(19) United States
(12) Patent Application Publication
(10) Pub. No.: US 2025/0269059 A1
(43) Pub. Date: Aug. 28, 2025

(54) RT EDITING COMPOSITIONS AND METHODS

(71) Applicant: CRISPR Therapeutics AG, Zug (CH)

(72) Inventors: Christof Fellmann, South Boston, MA (US); Aamir Mir, South Boston, MA (US); Parbir Singh Grewal, South Boston, MA (US); Megha Jayachandran, South Boston, MA (US); Victoria Barnhouse, South Boston, MA (US); Bhakti Narendra Kadam, South Boston, MA (US); Victor Chen, South Boston, MA (US); Qichen Yuan, South Boston, MA (US); Nassim Ajami, South Boston, MA (US); Cristian Loaiza, South Boston, MA (US); Benjamin Thomas Freeman, South Boston, MA (US)

(21) Appl. No.: 19/064,068

(22) Filed: Feb. 26, 2025

Related U.S. Application Data
(60) Provisional application No. 63/558,338, filed on Feb. 27, 2024.
(60) Provisional application No. 63/649,882, filed on May 20, 2024.
(60) Provisional application No. 63/718,994, filed on Nov. 11, 2024.

(51) Int. Cl. A61K 48/00; A61K 9/1272; A61K 9/51; A61P 5/00; A61P 11/00; C12N 9/12; C12N 9/22; C12N 15/11; C12N 15/86; C12N 15/88

(52) U.S. Cl. CPC A61K 48/005; A61K 9/1272; A61K 9/5123; A61P 5/00; A61P 11/00; C12N 9/1276; C12N 9/22; C12N 15/111; C12N 15/86; C12N 15/88; C07K 2319/09; C07K 2319/80; C12N 2310/20; C12N 2750/14143; C12N 2800/22; C12N 2830/48; C12Y 207/07049

(57) ABSTRACT

Disclosed herein include methods, compositions, and kits suitable for use in gene editing. RT editing systems are provided herein comprising a fusion protein comprising a Cas9 nickase and a reverse transcriptase, and a template armed guide RNA (tagRNA) comprising from 5′ to 3′ a spacer sequence, a scaffold sequence, an editing template and a flap binding sequence. In some embodiments, the RT editing system further comprises an enhancer guide RNA (egRNA).

### RELATED APPLICATIONS

[0001] The present application claims priority to U.S. Provisional Application No. 63/558,338, filed Feb. 27, 2024; U.S. Provisional Application No. 63/649,882, filed May 20, 2024; and U.S. Provisional Application No. 63/718,994, filed Nov. 11, 2024. The entire contents of these applications are hereby expressly incorporated by reference in their entireties.

### REFERENCE TO SEQUENCE LISTING

[0002] The present application is being filed along with a Sequence Listing in electronic format. The Sequence Listing is provided as a file entitled 80EM-341785-US_SeqListing, created Feb. 25, 2025, which is 10,377 kilobytes in size. The information in the electronic format of the Sequence Listing is incorporated herein by reference in its entirety.

### BACKGROUND

### Field

[0003] The present disclosure relates generally to the field of gene editing.

### Description of the Related Art

[0004] Many diseases and disorders have a genetic component, including those that involve pathogenic single nucleotide mutations. There is a need for nucleic acid editing compositions and methods with greater editing efficiency and specificity. Existing gene editing approaches wherein components are engineered to be expressed within target cells suffer from insufficient levels of expression, or inadequate efficacy in their action, to be therapeutically effective; or lack specificity in directing a precise editing outcome. There is a need for compositions and methods with improved strength, mechanistic efficacy, and duration of gene editing component expression and employment for in vivo applications.

### SUMMARY

[0005] Disclosed herein are reverse transcriptase (RT)-based editing systems. In some embodiments, the RT editing system comprises: a fusion protein comprising a Cas9 nickase and a reverse transcriptase, and a template armed guide RNA (tagRNA) comprising from 5′ to 3′ a spacer sequence, a scaffold sequence, an editing template and a flap binding sequence. In some embodiments, the RT editing system further comprises an enhancer guide RNA (egRNA).

[0006] Disclosed herein are reverse transcriptase (RT) editors. In some embodiments, the RT editor comprises: a DNA binding domain, a DNA endonuclease domain and a DNA polymerase domain, wherein the DNA polymerase domain and the DNA endonuclease domain are fused or linked to form a fusion protein, wherein the DNA polymerase domain comprises a reverse transcriptase, optionally a reverse transcriptase comprising an amino acid sequence that is at least 80% identical, at least 85% identical, at least 90% identical, or at least 95%, or 100% identical to any one of SEQ ID NOs: 141, 250-269, 315-319, 899-909, and 1015-1018, optionally an amino acid sequence having at least one, at least two, at least three, at least four, or at least five mismatches relative to the sequence of any one of SEQ ID NOs: 141, 250-269, and 315-319, 899-909, and 1015-1018, and wherein the DNA binding domain, DNA endonuclease domain comprises a Cas9 nickase, optionally a Cas9 nickase comprising an amino acid sequence that is at least 80% identical, at least 85% identical, at least 90% identical, or at least 95%, or 100% identical to any one of SEQ ID NOs: 142-163 and 270-314, optionally an amino acid sequence having at least one, at least two, at least three, at least four, or at least five mismatches relative to the sequence of any one of SEQ ID NOs: 142-163 and 270-314.

[0007] Disclosed herein include template armed guide RNAs (tagRNAs). In some embodiments, the tagRNA comprises: a spacer that is complementary to a search target sequence on a first strand of a double stranded target DNA; an editing template that comprises a region of complementarity to an editing target sequence on a second strand of the double stranded target DNA; and a scaffold sequence that associates with a reverse transcriptase (RT) editor comprising a DNA binding domain, a DNA endonuclease domain and a DNA polymerase domain, and wherein the first strand and the second strand of the double-stranded target DNA are complementary to each other.

[0008] In some embodiments, the tagRNA comprises a flap binding sequence at least partially complementary to the spacer. In some embodiments, the scaffold sequence is between the spacer and the editing template. In some embodiments, the tagRNA comprises from 5′ to 3′: the spacer, the scaffold sequence, the editing template, and the flap binding sequence. In some embodiments, the spacer, the scaffold sequence, the editing template, and the flap binding sequence form a contiguous sequence in a single molecule. In some embodiments, the editing template comprises an intended nucleotide edit compared to the double stranded target DNA. In some embodiments, the editing template comprises several intended nucleotide edits compared to the double stranded target DNA. In some embodiments, the tagRNA guides the RT editor to incorporate the intended nucleotide edit or edits into the double stranded target DNA when the tagRNA is contacted with the double stranded target DNA. In some embodiments, the RT editor synthesizes a single stranded DNA encoded by the editing template, wherein the single stranded DNA replaces the editing target sequence and results in incorporation of the intended nucleotide edit into a region corresponding to the editing target in the double stranded target DNA. In some embodiments, the search target sequence is complementary to a protospacer sequence in the double stranded target DNA, and wherein the protospacer sequence is adjacent to a protospacer adjacent motif (PAM) in the double stranded target DNA. In some embodiments, the tagRNA results in incorporation of a nucleotide edit or nucleotide edits in the PAM when contacted with the double stranded target DNA. In some embodiments, the tagRNA results in incorporation of a nucleotide edit or nucleotide edits outside the PAM when contacted with the double-stranded target DNA. In some embodiments, the spacer of the tagRNA is from 16 to 25 nucleotides in length, optionally 20 nucleotides in length or 21-23 nucleotides in length. In some embodiments, the flap binding sequence is about 2 to 20 nucleotides in length, optionally about 8 to 16 nucleotides in length or 6 nucleotides in length. In some embodiments, the editing template is about 4 to 30 nucleotides in length, optionally about 10 to 30 nucleotides in length, further optionally 6 to 9 nucleotides in length.

[0009] In some embodiments, the tagRNA results in incorporation of the intended nucleotide edit about 0 to 30 base pairs downstream of the nickase cleavage site. In some embodiments, the intended nucleotide edit comprises a single nucleotide substitution compared to the region corresponding to the editing target sequence in the double stranded target DNA, optionally, the single nucleotide substitution is a T>G substitution or a T>C substitution. In some embodiments, the intended nucleotide edit comprises more than one nucleotide substitution compared to the region corresponding to the editing target sequence. In some embodiments, the intended nucleotide edit or edits comprises an insertion compared to the region corresponding to the editing target in the double stranded target DNA (e.g., an insertion of a nucleotide sequence at least 50, at least 45, at least 40, at least 35, at least 30, at least 25, at least 20, at least 15, at least 10, or at least 5, nucleotides in length). In some embodiments, the intended nucleotide edit or edits comprises a deletion compared to the region corresponding to the editing target in the double stranded target DNA. In some embodiments, the editing template comprises one or more silent nucleotide edits compared to the region corresponding to the editing target in the double stranded target DNA. In some embodiments, the editing template comprises a wild type DNA sequence. In some embodiments, the tagRNA results in correction of a mutation when contacted with the double stranded target DNA. In some embodiments, the tagRNA comprises any one of the sequences of SEQ ID NOs: 16-47, 99-130, 164-181, 320-497, 563-682, 791-792, 1046-1053, and 1089-1203, or a sequence that exhibits at least about 80%, at least about 85%, at least 90%, at least 95%, or 100% identity to any one of the sequences of SEQ ID NOs: 16-47, 99-130, 164-181, 320-497, 563-682, 791-792, 1046-1053, and 1089-1203. In some embodiments, the tagRNA further comprises: 3′ mN*mN*mN*N and 5′ mN*mN*mN* modifications, where m indicates that the nucleotide contains a 2′-O-Me modification and a * indicates the presence of a phosphorothioate bond; and/or a structural motif at the 3′ terminus selected from the group consisting of: a prequeosine1-1 riboswitch aptamer (evopreQ1) and variants thereof, a frameshifting pseudoknot from Moloney murine leukemia virus (MMLV) (mpknot), G-quadruplexes, hairpin structures, xrRNA, and a P4-P6 domain of the group I intron; optionally, the structural motif is evopreQ1 or a variant thereof comprising a nucleotide sequence selected from SEQ ID NOs: 84-90. In some embodiments, a chemically modified 3′-terminus comprises inverted-dT. In some embodiments, the tagRNA further comprises: 3′ mN*mN*mN*N, 5′ mN*mN*mN*, and/or 3′ inverted-dT modifications.

[0010] Disclosed herein are reverse transcriptase (RT) editing systems. In some embodiments, the system comprises: a template armed guide RNA (tagRNA), or a nucleic acid encoding the tagRNA, wherein the tagRNA comprises: a spacer that is complementary to a search target sequence on a first strand of a nucleic acid molecule; an editing template that comprises a region of complementarity to an editing target sequence on a second strand of the nucleic acid molecule; and a scaffold sequence that associates with a reverse transcriptase (RT) editor comprising a DNA binding domain, a DNA endonuclease domain and a DNA polymerase domain; or a nucleic acid encoding the RT editor, wherein the DNA polymerase domain comprises a reverse transcriptase, optionally a reverse transcriptase comprising an amino acid sequence that is at least 80%, at least about 85%, at least 90%, at least 95%, or 100% identical to any one of SEQ ID NOs: 141, 250-269, 315-319, 899-909, and 1015-1018, optionally an amino acid sequence having at least one, at least two, at least three, at least four, or at least five mismatches relative to the sequence of any one of SEQ ID NOs: 141, 250-269, 315-319, 899-909, and 1015-1018, and wherein the DNA DNA endonuclease domain comprises a Cas9 nickase, optionally a Cas9 nickase comprising an amino acid sequence that is at least 80%, at least about 85%, at least 90%, at least 95%, or 100% identical to any one of SEQ ID NOs: 142-163 and 270-314, optionally an amino acid sequence having at least one, at least two, at least three, at least four, or at least five mismatches relative to the sequence of any one of SEQ ID NOs: 142-163 and 270-314.

[0011] Disclosed herein include reverse transcriptase (RT) editing systems. In some embodiments, the system comprises: any of the tagRNAs, or a nucleic acid encoding the tagRNA, described herein; and a reverse transcriptase (RT) editor comprising a DNA binding domain, a DNA endonuclease domain and a DNA polymerase domain, or a nucleic acid encoding the RT editor.

[0012] In some embodiments, RT editing system further comprises: an enhancer guide RNA (egRNA), or a nucleic acid encoding the egRNA, wherein the egRNA comprises a egRNA spacer that is complementary to a second search target sequence in the double stranded target DNA. In some embodiments, the second search target sequence is on the second strand of the double stranded target DNA. In some embodiments, the egRNA spacer is from 16 to 25 nucleotides in length, optionally 21-23 nucleotides in length, optionally 20 nucleotides in length. In some embodiments, the egRNA comprises a scaffold sequence. In some embodiments, the intended nucleotide edit incorporation rate of the RT editing system is greater than at least about 30%, about 40%, about 50%, about 60%, about 70%, or about 80%.

[0013] Disclosed herein include reverse transcriptase (RT) editing complexes. In some embodiments, the RT editing complex comprises: template armed guide RNA (tagRNA) comprising: a spacer that is complementary to a search target sequence on a first strand of a nucleic acid molecule; an editing template that comprises a region of complementarity to an editing target sequence on a second strand of the nucleic acid molecule; and a scaffold sequence that associates with a reverse transcriptase (RT) editor comprising a DNA binding domain, a DNA endonuclease domain and a DNA polymerase domain; or a nucleic acid encoding the RT editor, wherein the DNA polymerase domain comprises a reverse transcriptase, optionally a reverse transcriptase comprising an amino acid sequence that is at least 80%, at least about 85%, at least 90%, at least 95%, or 100% identical to any one of SEQ ID NOs: 141, 250-269, 315-319, 899-909, and 1015-1018, optionally an amino acid sequence having at least one, at least two, at least three, at least four, or at least five mismatches relative to the sequence of any one of SEQ ID NOs: 141, 250-269, 315-319, 899-909, and 1015-1018, and wherein the DNA endonuclease domain comprises a Cas9 nickase, optionally a Cas9 nickase comprising an amino acid sequence that is at least 80%, at least about 85%, at least 90%, at least 95%, or 100% identical to any one of SEQ ID NOs: 142-163 and 270-314, optionally an amino acid sequence having at least one, at least two, at least three, at least four, or at least five mismatches relative to the sequence of any one of SEQ ID NOs: 142-163 and 270-314.

[0014] In some embodiments, the RT editing complex comprises: (i) any of the tagRNAs disclosed herein and a reverse transcriptase (RT) editor comprising a DNA binding domain, a DNA endonuclease domain and a DNA polymerase domain; or (ii) any of the RT editing systems disclosed herein. In some embodiments, the intended nucleotide edit incorporation rate of the RT editing complex is greater than at least about 30%, about 40%, about 50%, about 60%, about 70%, or about 80%.

[0015] In some embodiments, the DNA binding domain, a DNA endonuclease domain is a CRISPR associated (Cas) protein domain. In some embodiments, the Cas protein domain has nickase activity. In some embodiments, the Cas protein domain is a Cas9. In some embodiments, the Cas9 comprises a mutation in an HNH domain. In some embodiments, the Cas9 comprises an H840A mutation in the HNH domain. In some embodiments, the Cas protein domain is a Cas12b. In some embodiments, the Cas protein domain is a Cas12a, Cas12b, Cas12c, Cas12d, Cas12e, Cas14a, Cas14b, Cas14c, Cas14d, Cas14e, Cas14f, Cas14g, Cas14h, Cas14u, Casϕ, Ssch1Cas9, Sro1Cas9, Sha4Cas9, SsuCas9, iSpyMacCas9, Ssi5Cas9, Ssi8Cas9, Ssci4Cas9, Shy1Cas9, Sag3Cas9, Slutr1Cas9, Ssch3Cas9, SpRYCas9, SpRYcCas9, Sma2Cas9, SsaCas9, EvoCjCas9, or iSpyMac. In some embodiments, the DNA polymerase domain is a reverse transcriptase, optionally the editing template is a reverse transcription template. In some embodiments, the reverse transcriptase is a retrovirus reverse transcriptase. In some embodiments, the reverse transcriptase is a Moloney murine leukemia virus (MMLV) reverse transcriptase. In some embodiments, the DNA polymerase domain and the DNA binding domain, a DNA endonuclease domain are fused or linked to form a fusion protein. In some embodiments, the DNA polymerase domain comprises a reverse transcriptase, optionally a reverse transcriptase comprising an amino acid sequence that is at least 80%, at least about 85%, at least 90%, at least 95%, or 100% identical to any one of SEQ ID NOs: 141, 250-269, 315-319, 899-909, and 1015-1018, optionally an amino acid sequence having at least one, at least two, at least three, at least four, or at least five mismatches relative to the sequence of any one of SEQ ID NOs: 141, 250-269, 315-319, 899-909, and 1015-1018; and/or the DNA binding domain, a DNA endonuclease domain comprises a Cas9 nickase, optionally a Cas9 nickase comprising an amino acid sequence that is at least 80%, at least about 85%, at least 90%, at least 95%, or 100% identical to any one of SEQ ID NOs: 142-163 and 270-314, optionally an amino acid sequence having at least one, at least two, at least three, at least four, or at least five mismatches relative to the sequence of any one of SEQ ID NOs: 142-163 and 270-314.

[0016] In some embodiments, the editing template comprises: (i) at least 1, 2, 3, 4, 5, 6, 7, 8, 9, 10, 11, 12, 13, or 14 2′ O-methyl RNA base(s); and/or (ii) at least 1, 2, 3, 4, 5, 6, 7, 8, 9, 10, 11, 12, 13, or 14 2′ Fluoro RNA base(s). In some embodiments, the FBS comprises: (i) at least 1, 2, 3, 4, 5, 6, 7, or 8 2′ O-methyl RNA base(s); and/or (ii) at least 1, 2, 3, 4, 5, 6, 7, or 8 2′ Fluoro RNA base(s).

[0017] In some embodiments, the scaffold sequence comprises a nucleotide sequence that is at least 80% identical (e.g., 80%, 81%, 82%, 83%, 84%, 85%, 86%, 87%, 88%, 89%, 90%, 91%, 92%, 93%, 94%, 95%, 96%, 97%, 98%, 99%, 100%, or a number or a range between any two of these values) to any one of SEQ ID NOs: 683-718, 894-898, and 964-1014 (e.g., a nucleotide sequence having one, two, three, four, or five mismatches relative to the sequence of any one of SEQ ID NOs: 683-718, 894-898, and 964-1014). In some embodiments, the scaffold sequence comprises one or more nucleotide substitutions, insertions, and/or deletions at one or more nucleotide positions relative to the parental scaffold sequence of SEQ ID NO: 683, such as, for example: (i) dinucleotide substitutions at nucleotide positions 5-6 and 34-35, optionally configured such that the nucleotide sequence at positions 5-6 is complementary to the nucleotide sequence at positions 34-35; (ii) a deletion at nucleotide positions 55-87, 57-87, 59-87, 61-87, or 63-87; (iii) a substitution at one or more of nucleotide positions 17, 18, 19, and 20, optionally a UUCG substitution at nucleotide positions 17-20; (iv) a deletion at nucleotide positions 14-16 and 21-24; (v) a replacement of nucleotides at nucleotide positions 11-28 with GUUCGC; and/or (vi) a deletion at nucleotide positions 12-16 and 21-26.

[0018] In some embodiments, the scaffold sequence comprises one or more nucleotide substitutions, insertions, and/or deletions at one or more nucleotide positions relative to the parental scaffold sequence of SEQ ID NO: 700, such as, for example, a substitution at one or more of nucleotide positions 13, 18, 21, 40, 50, and 52-53 (e.g., a U-to-C substitution at nucleotide position 13; an A-to-G substitution at nucleotide position 18; an A-to-C or an A-to-U substitution at nucleotide position 21; a C-to-U or a C-to-A or a C-to-G substitution at nucleotide position 40; a U-to-C or a U-to-A or a U-to-G substitution at nucleotide position 50; an A-to-C or an A-to-U or an A-to-G substitution at nucleotide position 52; and/or an A-to-C or an A-to-U or an A-to-G substitution at nucleotide position 53). In some embodiments, the scaffold sequence comprises one or more modifications (e.g., nucleoside modification(s), sugar modification(s), modified internucleoside linkage(s), and/or backbone modification(s)) relative to the parental scaffold sequence of SEQ ID NO: 700, such as, for example, a 2′ O-methyl modification at one or more of nucleotide positions 5-9, 12-21, 29, 37-38, 40, 50, and 52-53. In some embodiments, the scaffold sequence comprises any one of the sequences of SEQ ID NOs: 894-898 and 964-1014, or a sequence that exhibits at least about 85% identity to any one of the sequences of SEQ ID NOs: 894-898 and 964-1014. In some embodiments, the scaffold sequence of the tagRNA, the scaffold sequence of the egRNA, or both, comprises the sequence of any one of SEQ ID NOs: 1210-1266 or a sequence that exhibits at least about 85% identity to any one of SEQ ID NOs: 1210-1266.

[0019] In some embodiments, the DNA polymerase domain comprises a reverse transcriptase. In some embodiments, the DNA polymerase domain comprises a reverse transcriptase comprising one or more mutations. In some embodiments, at least one of the one or more mutations is at an amino acid position functionally equivalent to V101, N200, A208, G248, P330, L435, K445, and/or A623 relative to SEQ ID NO: 8.

[0020] In some embodiments, the DNA polymerase domain comprises a reverse transcriptase comprising an amino acid sequence that is at least 80% identical to SEQ ID NO: 255. In some embodiments, the reverse transcriptase comprises one or more mutations. In some embodiments, at least one of the one or more mutations is at amino acid position V98, N197, A205, S245, P327, V432, R442, and/or A623 relative to SEQ ID NO: 255. In some embodiments, the reverse transcriptase comprises one or more transition mutations selected from the group consisting of V98R, N197C, N197D, N197G, A205T, S245C, P327E, P327Q, V432K, R442T, and A623F relative to SEQ ID NO: 255.

[0021] In some embodiments, the DNA polymerase domain comprises a reverse transcriptase comprising an amino acid sequence that is at least 80% identical to SEQ ID NO: 260. The reverse transcriptase can comprise one or more mutations. In some embodiments, at least one of the one or more mutations is at amino acid position V106, N204, E212, G252, P334, L440, E450, and/or A629 relative to SEQ ID NO: 260. In some embodiments, the reverse transcriptase comprises one or more transition mutations selected from the group consisting of V106R, N204C, N204D, N204G, E212T, G252C, P334E, P334Q, L440K, E450T, and/or A629F relative to SEQ ID NO: 260.

[0022] In some embodiments, the DNA polymerase domain comprises a reverse transcriptase comprising an amino acid sequence that is at least 80% identical to SEQ ID NO: 255. In some embodiments, the reverse transcriptase comprises an N197C or V98R transition mutation relative to SEQ ID NO: 255.

[0023] In some embodiments, the DNA polymerase domain comprises a reverse transcriptase comprising an amino acid sequence that is at least 80% identical to SEQ ID NO: 260. In some embodiments, the reverse transcriptase comprises an N204C or V106R transition mutation relative to SEQ ID NO: 260.

[0024] In some embodiments, the RT editor further comprises an accessory domain. In some embodiments, the accessory domain comprises a single-strand binding (SSB) protein domain or a stabilon. In some embodiments, the SSB protein domain is derived from RecA protein, Sso7d protein, or Sto7d protein. In some embodiments, the accessory domain is situated at the N-terminus, the C-terminus, or at an internal location of the RT editor. In some embodiments, the RT editor comprising an accessory domain comprises an amino acid sequence that is at least 85% identical to any one of SEQ ID NOs: 1276-1298. In some embodiments, the SSB protein domain is derived from Sso7d and comprises one or more mutations at an amino acid position functionally equivalent to K12 and/or E35 of a wild type Sso7d amino acid sequence. In some embodiments, the one or more mutations comprise K12L and/or E35L relative to a wild type Sso7d sequence. In some embodiments, the SSB protein domain comprises an amino acid sequence that is at least 85% identical to SEQ ID NO: 1205. In some embodiments, the RT editor comprising the SSB protein domain comprises from N-terminus to C-terminus: [N-terminus of nCas9]-[linker]-[SSB protein domain]-[linker]-[RT]-[linker]-[C-terminus of nCas9]. In some embodiments, the N-terminus of nCas9 comprises an amino acid sequence functionally equivalent to amino acids 1-1247 of SEQ ID NO: 6 and/or the C-terminus of nCas9 comprises an amino acid sequence functionally equivalent to amino acids 1248-1367 of SEQ ID NO: 6. In some embodiments, the RT editor comprising the SSB protein domain comprises an amino acid sequence that is at least 85% identical to any one of SEQ ID NOs: 1207-1209.

[0025] Disclosed herein include ribonucleoprotein (RNP) complexes. In some embodiments, the RNP complex comprises any of the RT editing complexes described herein, or a component thereof.

[0026] Disclosed herein include lipid nanoparticles (LNPs). In some embodiments, the LNP comprises any of the RT editing systems described herein, or a component thereof. In some embodiments, the LNP comprises the tagRNA and the nucleic acid encoding the RT editor. In some embodiments, the nucleic acid encoding the RT editor is mRNA. In some embodiments, the LNP comprises a egRNA.

[0027] Disclosed herein include polynucleotides. In some embodiments, the polynucleotide encodes any of the RT editors, the tagRNAs, the RT editing systems, or the RT editing complexes described herein. In some embodiments, the polynucleotide is an mRNA. In some embodiments, the polynucleotide is operably linked to a regulatory element, optionally the regulatory element is an inducible regulatory element.

[0028] Disclosed herein include vectors. In some embodiments, the vector comprises any of the polynucleotides described herein. In some embodiments, the vector is an AAV vector.

[0029] Also provided herein are isolated cells. In some embodiments, the isolated cell comprises an RT editor, a tagRNA, an RT editing system, an RT editing complex, an RNP, an LNP, a polynucleotide, or a vector of the disclosure. In some embodiments, the cell is a mammalian cell, optionally a human cell. In some embodiments, the cell is a primary cell. In some embodiments, the cell is a hepatocyte. In some embodiments, the cell is from a subject having a disease or disorder, optionally Wilson's disease, further optionally the subject is a human. In some embodiments, the cell is from a subject having a disease or disorder, optionally alpha1 antitrypsin deficiency disease, further optionally the subject is a human. The disease or disorder can be selected from the group comprising an autoimmune disease, a neurological disease or disorder, a cancer, an inflammatory disease, a cardiovascular disease, an infectious disease, a genetic disease, a trinucleotide repeat expansion disorder, a metabolic disease, or any combination thereof. In some embodiments, the cell is from a subject having a disease or disorder, optionally phenylketonuria or hyperphenylalaninemia, further optionally the subject is a human.

[0030] Disclosed herein include pharmaceutical compositions. In some embodiments, the pharmaceutical composition comprises: (i) a RT editor, a tagRNA, a RT editing system, a RT editing complex, a RNP, a LNP, a polynucleotide, a vector, or a cell of the disclosure; and (ii) a pharmaceutically acceptable carrier.

[0031] Disclosed herein include methods for editing a double stranded target DNA. In some embodiments, the method comprises contacting the double stranded target DNA with (i) any of the tagRNAs of the disclosure and a reverse transcriptase (RT) editor comprising a DNA binding domain, a DNA endonuclease domain and a DNA polymerase domain or (ii) any of the RT editing systems described herein, wherein the tagRNA directs the RT editor to incorporate the intended nucleotide edit in the double stranded target DNA, thereby editing the double stranded target DNA.

[0032] Disclosed herein include methods for editing a double stranded target DNA. In some embodiments, the method comprises contacting the double stranded target DNA with any of the RT editing complexes of the disclosure, wherein the tagRNA directs the RT editor to incorporate the intended nucleotide edit in the double stranded target DNA, thereby editing the double stranded target DNA.

[0033] In some embodiments, the RT editor synthesizes a single stranded DNA encoded by the editing template, wherein the single stranded DNA replaces the editing target sequence and results in incorporation of the intended nucleotide edit or edits into a region corresponding to the editing target in the double stranded target DNA. In some embodiments, the double stranded target DNA is in a cell. In some embodiments, the cell is a mammalian cell, optionally a human cell. In some embodiments, the cell is a primary cell. In some embodiments, the cell is a hepatocyte. In some embodiments, the cell is a stem cell; optionally, an embryonic stem cell, an induced pluripotent stem cell, or an adult stem cell. In some embodiments, the cell is in a subject, optionally the subject is a human. In some embodiments, the cell is from a subject having a disease or disorder, optionally Wilson's disease. In some embodiments, the cell is from a subject having a disease or disorder, optionally alpha1 antitrypsin deficiency disease. In some embodiments, the cell is from a subject having a disease or disorder, optionally phenylketonuria or hyperphenylalaninemia. The disease or disorder can selected from the group comprising an autoimmune disease, a neurological disease or disorder, a cancer, an inflammatory disease, a cardiovascular disease, an infectious disease, a genetic disease, a trinucleotide repeat expansion disorder, a metabolic disease, or any combination thereof. In some embodiments, the method further comprises administering the cell to the subject after incorporation of the intended nucleotide edit.

[0034] Disclosed herein include cells generated by any of the methods described herein. Disclosed herein include populations of cells generated by any of the methods disclosed herein.

[0035] Disclosed herein include methods for treating or preventing a disease or disorder in a subject in need thereof. In some embodiments, the method comprises administering to the subject any of the RT editing systems of the disclosure, wherein the editing template comprises an intended nucleotide edit compared to a double stranded target DNA of the subject, wherein the tagRNA directs the RT editor to incorporate the intended nucleotide edit in the double stranded target DNA, and wherein incorporation of the intended nucleotide edit corrects a mutation in the double stranded target DNA associated with the disease or disorder, thereby treating or preventing the disease or disorder in the subject. The disease or disorder can selected from the group comprising an autoimmune disease, a neurological disease or disorder, a cancer, an inflammatory disease, a cardiovascular disease, an infectious disease, a genetic disease, a trinucleotide repeat expansion disorder, a metabolic disease, or any combination thereof.

[0036] Disclosed herein include methods for treating or preventing a disease or disorder in a subject in need thereof. In some embodiments, the method comprises administering to the subject any of the RT editing complexes, the RNPs, the LNPs, or the pharmaceutical compositions of the disclosure, wherein the editing template comprises an intended nucleotide edit compared to a double stranded target DNA of the subject, wherein the tagRNA directs the RT editor to incorporate the intended nucleotide edit in the double stranded target DNA, and wherein incorporation of the intended nucleotide edit corrects a mutation in the double stranded target DNA associated with the disease or disorder, thereby treating or preventing the disease or disorder in the subject. The disease or disorder can selected from the group comprising an autoimmune disease, a neurological disease or disorder, a cancer, an inflammatory disease, a cardiovascular disease, an infectious disease, a genetic disease, a trinucleotide repeat expansion disorder, a metabolic disease, or any combination thereof.

[0037] Disclosed herein include messenger RNAs (mRNAs). In some embodiments, the mRNA encodes a reverse transcriptase (RT) editor. In some embodiments, the mRNA encodes any of the RT editors of the disclosure. In some embodiments, the mRNA comprises one or more of a 5′-cap structure, a 5′-UTR, a 3′-UTR, and a nuclear localization sequence (NLS). In some embodiments, the mRNA comprises (i) a 5′-cap, (ii) a 5′-untranslated region (UTR); (iii) an open reading frame (ORF) comprising a nucleotide sequence that encodes the RT editor; and (iv) a 3′ untranslated region (UTR). In some embodiments, the mRNA has a structure comprising or consisting of 5′-[5′UTR]-[NLS]-[nCas9]-[linker]-[RT]-[NLS]-[3′UTR and/or viral element]-[polyA sequence]-3′. In some embodiments, one or more nucleosides of the mRNA sequence are chemically modified. In some embodiments, the mRNA comprises one or more additional segmented polyA sequences configured to increase mRNA stability and/or half-life. In some embodiments, the mRNA comprises one or more viral element sequences, optionally 3′ of the 3′-UTR. In some embodiments, the viral element comprises a woodchuck hepatitis virus post-transcriptional regulatory element (WPRE) sequence, optionally comprising the sequence of SEQ ID NO: 189, or a sequence that exhibits at least about 80%, at least about 85%, at least 90%, at least 95%, or 100% identity to SEQ ID NO: 189. In some embodiments, the viral element comprises a eK5 sequence, optionally located 3′ of the 3′-UTR, optionally comprising the sequence of SEQ ID NO: 190, or a sequence that exhibits at least about 80%, at least about 85%, at least 90%, at least 95%, or 100% identity to SEQ ID NO: 190. In some embodiments, the mRNA comprises one or more secondary structure motifs. In some embodiments, a secondary structure motif comprises a triple helix sequence, optionally a synthetic triple helix (STH) sequence. In some embodiments, the STH sequence comprises the sequence derived from a sequence element of a long non-coding RNA, optionally MALAT1. In some embodiments, the STH sequence comprises any one of the sequences of SEQ ID NOs: 191-192 and 245-249, or a sequence that exhibits at least about 80%, at least about 85%, at least 90%, at least 95%, or 100% identity to any one of the sequences of SEQ ID NOs: 191-192 and 245-249.

[0038] In some embodiments, the mRNA comprises: a polyA sequence comprising any one of the sequences of SEQ ID NOs: 182-187, or a sequence that exhibits at least about 80%, at least about 85%, at least 90%, at least 95%, or 100% identity to any one of the sequences of SEQ ID NOs: 182-187; one or more 3′ UTR element sequences selected from the group comprising any one of the sequences of SEQ ID NOs: 188-190, or a sequence that exhibits at least about 80%, at least about 85%, at least 90%, at least 95%, or 100% identity to any one of the sequences of SEQ ID NOs: 188-190; one or more 3′ UTR structural motifs selected from the group comprising any one of the sequences of SEQ ID NOs: 191-192, or a sequence that exhibits at least about 80%, at least about 85%, at least 90%, at least 95%, or 100% identity to any one of the sequences of SEQ ID NOs: 191-192; a 5′UTR sequence comprising the sequence of any one of SEQ ID NOS: 193 and 910-933, or a sequence that exhibits at least about 80%, at least about 85%, at least 90%, at least 95%, or 100% identity to any one of SEQ ID NOS: 193 and 910-933; and/or an RT editor sequence comprising the sequence of SEQ ID NO: 194, or a sequence that exhibits at least about 80%, at least about 85%, at least 90%, at least 95%, or 100% identity to SEQ ID NO: 194. In some embodiments, the mRNA comprises a 3′ UTR comprising any one of the sequences of SEQ ID NOs: 195-219, or a sequence that exhibits at least about 80%, at least about 85%, at least 90%, at least 95%, or 100% identity to any one of the sequences of SEQ ID NOs: 195-219. The mRNA can comprise one or more 5′ UTR element sequences selected from the group comprising any one of the sequences of SEQ ID NOs: 940-950 and 1075, or a sequence that exhibits at least about 85% identity to any one of the sequences of SEQ ID NOs: 940-950 and 1075. The mRNA can comprise one or more 3′ UTR element sequences selected from the group comprising any one of the sequences of SEQ ID NOs: 951-961 and 1076-1080, or a sequence that exhibits at least about 85% identity to any one of the sequences of SEQ ID NOs: 951-961 and 1076-1080. The mRNA can comprise one or more additional elements selected from the group comprising any one of the sequences of SEQ ID NOs: 962-963, or a sequence that exhibits at least about 85% identity to any one of the sequences of SEQ ID NOs: 962-963, and in some embodiments said one or more additional elements are situated downstream of the 3′UTR and/or the polyA tail. In some embodiments, the mRNA comprises one or more 5′-UTR element sequences selected from the group comprising any one of the sequences of SEQ ID NOs: 1081-1082, wherein the second codon of the mRNA is a “gcc”. In some embodiments, the mRNA is codon optimized for expression in human cells. In some embodiments, the mRNA (e.g., codon-optimized) comprises the sequence of any one of SEQ ID NOs: 1086-1088. Disclosed herein include ribonucleoprotein (RNP) complexes, lipid nanoparticles (LNPs), vectors, isolated cells, and pharmaceutical compositions comprising any of the mRNA of the disclosure. Disclosed herein include polynucleotides encoding the mRNAs provided herein.

### BRIEF DESCRIPTION OF THE DRAWINGS

[0039] The patent or application file contains at least one drawing executed in color. Copies of this patent or patent application publication with color drawing(s) will be provided by the Office upon request and payment of the necessary fee.

[0040] FIG. 1 displays ATP7B genomic and protein sequences near the location of amino acid position 1069. Also shown are exemplary locations of spacer sequences of the disclosure.

[0041] FIG. 2 displays non-limiting exemplary efficiencies for correction of the H1069Q mutation as assayed in HEK293T cells that contain the H1069Q mutation (H1069Q HEK293T). In this experiment, editing components were delivered by plasmid transfection.

[0042] FIG. 3A-FIG. 3C display editing efficiencies in H1069Q HEK293T cells using mRNA (encoding the RT editor) and synthetic gRNA.

[0043] FIG. 4A-FIG. 4C display editing efficiencies in H1069Q Huh7 cells using mRNA (encoding the RT editor) and synthetic gRNA.

[0044] FIG. 5 displays non-limiting exemplary results of a spacer screen in the indicated cell types containing the H1069Q mutation. Cells were transfected with Cas9 mRNA and a synthetic gRNA.

[0045] FIG. 6 depicts an exemplary 3D structure of an RNA comprising SEQ ID NO: 245 (Comp14 transcript). FIG. 6 is original FIG. 3A from Wilusz, Jeremy E., et al. “A triple helix stabilizes the 3′ ends of long noncoding RNAs that lack poly(A) tails.” GenesDev 26 (2012): 2392-2407.

[0046] FIG. 7 depicts exemplary 3D structure of an RNA comprising SEQ ID NO: 247, 248, or 249. FIG. 7 is original FIG. 1A from Brown, Jessica A., et al. “Formation of triple-helical structures by the 3′-end sequences of MALAT1 and MENβ noncoding RNAs.” PNAS 109 (2012): 19202-19207.

[0047] FIG. 8 depicts an exemplary structure of an RNA comprising SEQ ID NO: 245 (predicted secondary structure of the 3′ end of the mature Comp.14 transcript).

[0048] FIG. 9 depicts an exemplary structure of an RNA comprising SEQ ID NO: 246 (full-length segment from human MALAT1 (HTH)).

[0049] FIG. 10 depicts an exemplary structure of an RNA comprising SEQ ID NO: 191 (synthetic triple helix, trimmed, adaptation, based on synthetic mix MALAT1 (STH)).

[0050] FIG. 11 depicts exemplary modified nucleotides that can be used in the RNAs (e.g., tagRNAs) of the disclosure.

[0051] FIG. 12 depicts a non-limiting exemplary structure of a scaffold RNA of the disclosure. Shown are various regions of the scaffold that were modified (See, e.g., Table 14A-Table 14C and Table 23).

[0052] FIG. 13 depicts a non-limiting exemplary schematic of a tagRNA according to the methods and compositions of the disclosure.

[0053] FIG. 14 depicts a non-limiting exemplary flow diagram for improvement of RT editing methods of the disclosure.

[0054] FIG. 15 depicts a non-limiting exemplary secondary structure of a tagRNA scaffold, with regions for optimization outlined by a box.

[0055] FIG. 16 depicts non-limiting exemplary data related to sequence optimization of the tagRNA scaffold. Shown are editing efficiencies of tested tagRNA scaffold sequence variants.

[0056] FIG. 17A-FIG. 17B depict non-limiting exemplary data related to an ET-FBS screen with a SsaCas9-based RT editor in Huh7 cells. Shown are the % T>C correction data (FIG. 17A) and percent indel formation data (FIG. 17B) for flap binding sequence (FBS) and editing template (ET) length variants tested.

[0057] FIG. 18A-FIG. 18B depict non-limiting exemplary data related to an ET-FBS screen with a truncated scaffold and shorter lengths. Shown are editing data for the variants tested with a dose of 125 ng mRNA and either 0.25 pmol tagRNA (FIG. 18A) or 0.07 pmol tagRNA (FIG. 18B).

[0058] FIG. 19 depicts non-limiting exemplary data related to optimization of the tagRNA spacer length.

[0059] FIG. 20 depicts non-limiting exemplary data related to editing results derived chemically modified scaffolds.

[0060] FIG. 21 depicts a non-limiting exemplary phylogenetic tree of MMLV, bat, and avian reverse transcriptases.

[0061] FIG. 22 depicts non-limiting exemplary data of editing efficiencies of RTs of the disclosure in correction of ATP7B mutation in Huh7 cells.

[0062] FIG. 23 depicts non-limiting exemplary data of editing efficiencies of RTs of the disclosure in ATP7B surrogate mutation correction in primary human hepatocytes.

[0063] FIG. 24A-FIG. 24B depict non-limiting exemplary data related to editing efficiencies of M. brandtii variants. In FIG. 24B, lower concentrations of all RNA components were used as compared to FIG. 24A. The experimental data of FIG. 24B employed improved chemical modifications in the tagRNA as compared to FIG. 24A. P1_30 is also referred to herein as ChemMod_Set2_30.

[0064] FIG. 25A-FIG. 25B depict non-limiting exemplary data related to editing efficiencies of M. georgiana variants. In FIG. 25B, lower concentrations of all RNA components were used as compared to FIG. 25A. The tagRNA of FIG. 25B used improved chemical modifications in the tagRNA as compared to FIG. 25A.

[0065] FIG. 26A-FIG. 26B depict non-limiting exemplary data related to M. brandtii variants (FIG. 26A) and M. georgiana variants (FIG. 26B) in primary human hepatocytes.

[0066] FIG. 27 depicts non-limiting exemplary data related to improved editing exhibited by different RT variants.

[0067] FIG. 28 depicts non-limiting exemplary data related to editing efficiencies using different 5′ UTRs in the mRNA encoding the RT.

[0068] FIG. 29A-FIG. 29B depicts non-limiting exemplary data related to editing results in Groups 1, 2, and 4 (FIG. 29A) and Group 3 (FIG. 29B) of a first in vivo proof of concept study performed in a humanized AATD mouse model.

[0069] FIG. 30 depicts non-limiting exemplary data related to editing results in a second in vivo proof of concept study performed in a humanized AATD mouse model.

[0070] FIG. 31 depicts a non-limiting exemplary schematic of mouse exon 12 being replaced with the human exon 12 in the humanized PKU mouse model generated.

[0071] FIG. 32 depicts non-limiting exemplary data related to editing results in an in vivo proof of concept study performed in humanized PKU mice.

[0072] FIG. 33 depicts editing frequencies of codon-optimized RT editors for correction of ATP7B surrogate mutation in primary human hepatocytes.

[0073] FIG. 34 depicts editing frequencies of codon-optimized RT editors for correction of PAH surrogate mutation in primary human hepatocytes.

[0074] FIG. 35 displays an exemplary schematic of SSB insertion sites within an RT editor.

[0075] FIG. 36 depicts an exemplary schematic and 3D model for insertion of an SSB as a chimeric protein with nSsaCas9.

[0076] FIG. 37 displays a bar graph of exemplary editing data using the indicated RT editor variants.

[0077] FIG. 38 shows editing results from a stabilion variant screen.

[0078] FIG. 39 displays results of in vivo screening of indicated mRNAs encoding an RT editor.

[0079] FIG. 40 displays an exemplary schematic of an SSB (e.g., Sso7d) insertion sites within an RT editor.

[0080] FIG. 41 displays exemplary editing data using the indicated RT editors.

[0081] FIG. 42 displays editing data for correction of a Wilson's disease mutation from primary human hepatocytes using the indicated mRNA, for the purpose of testing different linkers, NLSs, UTRs, RTs, stabilizing elements, and polyA tails.

[0082] FIG. 43 displays editing data from tested in Huh7 cells containing the ATP7B H1069Q mutation using the indicated chemically modified tagRNA.

[0083] FIG. 44 displays editing data from tested in Huh7 cells containing the ATP7B H1069Q mutation using the indicated chemically modified tagRNA.

[0084] FIG. 45 displays editing data from tested in Huh7 cells containing the ATP7B H1069Q mutation using the indicated chemically modified tagRNA.

[0085] FIG. 46 displays exemplary in vivo data from mouse for correction of human ATP7B (H1069Q) using the indicated RT editor mRNA.

[0086] FIG. 47 displays exemplary in vivo data from mouse for correction of human ATP7B mutation using the indicated mRNA encoding RT editor and tagRNAs.

[0087] FIG. 48 displays in vivo data from mouse for correction of PAH-R408W mutation using the indicated mRNA encoding RT editor, tagRNA, and egRNA. Shown from left to right on the graph are data using: pTPRT-U-493, pTPRT-U-540, pTPRT-U-543. pTPRT-U-554, pTPRT-U-558, pVC313, pVC268, and pAM198.

[0088] FIG. 49 displays exemplary editing data using the indicated tagRNA scaffold.

[0089] FIG. 50 displays exemplary editing data using the indicated tagRNA scaffold.

[0090] FIG. 51 displays exemplary editing data using the indicated egRNA scaffold.

### DETAILED DESCRIPTION

[0091] In the following detailed description, reference is made to the accompanying drawings, which form a part hereof. In the drawings, similar symbols typically identify similar components, unless context dictates otherwise. The illustrative embodiments described in the detailed description, drawings, and claims are not meant to be limiting. Other embodiments may be utilized, and other changes may be made, without departing from the spirit or scope of the subject matter presented herein. It will be readily understood that the aspects of the present disclosure, as generally described herein, and illustrated in the Figures, can be arranged, substituted, combined, separated, and designed in a wide variety of different configurations, all of which are explicitly contemplated herein and made part of the disclosure herein.

[0092] All patents, published patent applications, other publications, and sequences from GenBank, and other databases referred to herein are incorporated by reference in their entirety with respect to the related technology.

[0093] Disclosed herein include compositions for reverse transcriptase (RT) editing. Compositions disclosed herein comprise an RT editing system, comprising an RT editor, template armed guide RNA (tagRNAs). In some embodiments, the RT editing system comprises an additional gRNA designated herein as ‘egRNA’.

[0094] Also provided herein are ribonucleoprotein (RNP) complexes comprising any of the RT editing complexes disclosed herein, or a component thereof. Disclosed herein include lipid nanoparticles (LNPs). In some embodiments, the LNP comprises any of the RT editing systems disclosed herein, or a component thereof. Provided herein include polynucleotides. In some embodiments the polynucleotide encodes any of the tagRNAs, the RT editor, the egRNA, or the RT editing complexes of the disclosure. Disclosed herein include isolated cells. In some embodiments, the isolated cell comprises any of the tagRNAs, the RT editor, the egRNA, the RT editing complexes, the RNPs, the LNPs, or the vectors provided herein.

[0095] Disclosed herein include compositions. In some embodiments, the composition is a pharmaceutical composition. In some embodiments, the pharmaceutical composition comprises: any of the tagRNAs, the RT editor, the egRNA, the RT editing systems, the RT editing RT editing complexes, the RNPs, the LNPs, the polynucleotides, the vectors, or the cells disclosed herein; and (ii) a pharmaceutically acceptable carrier.

[0096] Disclosed herein include methods for editing a mutated gene. In some embodiments, the method comprises contacting the gene at the site of mutation with (i) any of the tagRNAs of the disclosure and a RT editor. In some embodiments, the tagRNA directs the RT editor to incorporate the intended nucleotide edit or edits in the mutated gene, thereby editing the mutated gene and correcting the mutation.

[0097] Disclosed herein include methods for treating a disease or disorder in a subject in need thereof. In some embodiments, the method comprises administering to the subject (i) any of the tagRNAs of the disclosure and a RT editor. In some embodiments, the tagRNA directs the RT editor to incorporate the intended nucleotide edit or edits in the mutated gene in the subject, thereby treating the disease or disorder in the subject.

[0098] Disclosed herein include methods for editing an ATP7B gene. In some embodiments, the method comprises contacting the ATP7B gene with (i) any of the tagRNAs of the disclosure and a RT editor. In some embodiments, the tagRNA directs the RT editor to incorporate the intended nucleotide edit in the ATP7B gene, thereby editing the ATP7B gene.

[0099] Disclosed herein include methods for treating Wilson's disease in a subject in need thereof. In some embodiments, the method comprises administering to the subject (i) any of the tagRNAs of the disclosure and a RT editor. In some embodiments, the tagRNA directs the RT editor to incorporate the intended nucleotide edit in the ATP7B gene in the subject, thereby treating Wilson's disease in the subject.

[0100] Provided herein are methods and compositions of editing of the SERPINA1 gene that encodes A1AT serine protease inhibitor for treating alpha1 antitrypsin deficiency (AATD) disease. Editing of the S allele mutation or the Z allele mutation in SERPINA1 gene are contemplated herein. The Z allele mutation on exon 5 of SERPINA1 is an E342K mutation. E342K mutation leads to misfolding of the AAT protein leading to polymers and liver damage. Contemplated are methods for a single nucleotide (T->C) correction leading to a K342E correction at the SERPINA1 gene.

[0101] Provided herein are methods and compositions of editing of the PAH gene that encodes Phenylalanine hydroxylase enzyme for treating phenylketonuria or hyperphenylalaninemia. Editing of the R408W mutation is contemplated herein. The R408W mutation is located in exon 12 of the PAH gene, within the protein's catalytic domain, and causes the PAH protein to misfold. This structural alteration results in a significant reduction in enzyme activity. Contemplated are methods for a single nucleotide (T->C) correction leading to a W408R correction at the PAH gene.

### Definitions

[0102] Unless defined otherwise, technical and scientific terms used herein have the same meaning as commonly understood by one of ordinary skill in the art to which the present disclosure belongs. See, e.g. Singleton et al., Dictionary of Microbiology and Molecular Biology 2nd ed., J. Wiley & Sons (New York, NY 1994); Sambrook et al., Molecular Cloning, A Laboratory Manual, Cold Spring Harbor Press (Cold Spring Harbor, NY 1989). For purposes of the present disclosure, the following terms are defined below.

[0103] As used herein, the term “about” can mean plus or minus 5% of the provided value.

[0104] As used herein, the terms “DNA binding domain” and “nucleic acid programmable DNA binding protein” or “napDNAbp,” of which a Cas protein is an example, may be used interchangeably herein, and can refer to proteins that use RNA:DNA hybridization to target and bind to specific sequences in a DNA molecule. Each napDNAbp is associated with at least one guide nucleic acid (e.g., guide RNA), which localizes the napDNAbp to a DNA sequence that comprises a DNA strand (i.e., a target strand) that is complementary to the guide nucleic acid, or a portion thereof (e.g., the protospacer of a guide RNA). In other words, the guide nucleic-acid “programs” the napDNAbp (e.g., Cas9 or equivalent) to localize and bind to a complementary sequence. As used herein, the term “nucleic acid programmable DNA binding protein” or “napDNAbp,” of which Cas9 is an example, refer to proteins that use RNA:DNA hybridization to target and bind to specific sequences in a DNA molecule. Each napDNAbp is associated with at least one guide nucleic acid (e.g., guide RNA), which localizes the napDNAbp to a DNA sequence that comprises a DNA strand (i.e., a target strand) that is complementary to the guide nucleic acid, or a portion thereof (e.g., the protospacer of a guide RNA). In other words, the guide nucleic-acid “programs” the napDNAbp (e.g., Cas9 or equivalent) to localize and bind to a complementary sequence.

[0105] As used herein, the term “guide RNA” or “gRNA” can refer to a site-specific targeting RNA that can bind an RNA-guided endonuclease to form a complex, and direct the activities of the bound RNA-guided endonuclease (such as a Cas endonuclease) to a specific sequence within a target nucleic acid (e.g., a specific gene or region within a gene). The guide RNA can include one or more RNA molecules. In some embodiments, the gRNA is a template armed gRNA (tagRNA). In some embodiments, the gRNA is an enhancer gRNA (egRNA).

[0106] As used herein, the term “target DNA” can refer to the specific region on a double-stranded DNA within a subject's genome intended for editing by a gene editing system. In certain embodiments, the gene editing system is an RT editing system.

[0107] As used herein, the term “search target sequence” can refer to the sequence on target strand that is complementary or substantially complementary to the spacer sequence of the tagRNA.

[0108] As used herein, the term “editing target sequence” can refer to the sequence being edited on the non-target strand.

[0109] As used herein, the term “silent mutation” can refer to a nucleotide change or nucleotide changes (for e.g., substitution or substitutions) in a DNA sequence that does not result in a change to the amino acid sequence of the protein the DNA sequence encodes.

[0110] As used herein, the term “protospacer” refers to the sequence in DNA adjacent to the PAM (protospacer adjacent motif) sequence. In some embodiments, the protospacer is 20 nucleotides long. The protospacer shares the same sequence as the spacer sequence of the guide RNA. The guide RNA anneals to the complement of the protospacer sequence on the target DNA (specifically, one strand thereof, i.e., the “target strand” versus the “non-target strand” of the target DNA sequence). In order for Cas9 to function it also requires a specific protospacer adjacent motif (PAM) that varies depending on the bacterial species of the Cas9 gene. The skilled person will appreciate that the literature in the state of the art sometimes refers to the “protospacer” as the target-specific guide sequence on the guide RNA itself, rather than referring to it as a “spacer.” Thus, in some cases, the term “protospacer” as used herein may be used interchangeably with the term “spacer.” The context of the description surrounding the appearance of either “protospacer” or “spacer” will help inform the reader as to whether the term is in reference to the gRNA or the DNA target.

[0111] As used herein, the terms “upstream” and “downstream” define relevant positions at least two regions or sequences in a nucleic acid molecule orientated in a 5′-to-3′ direction. For example, a first sequence is upstream of a second sequence in a DNA molecule where the first sequence is positioned 5′ to the second sequence. Accordingly, the second sequence is downstream of the first sequence.

[0112] As used herein, the term “protospacer adjacent sequence” or “PAM” refers to a DNA sequence that is an important targeting component of a Cas9 nuclease. The PAM sequence can be on either strand, and is downstream in the 5′ to 3′ direction of the Cas9 cut site. Different PAM sequences can be associated with different Cas9 nucleases or equivalent proteins from different organisms.

[0113] As used herein, the term “spacer sequence” in connection with a guide RNA or a tagRNA refers to the portion of the guide RNA or tagRNA which contains a nucleotide sequence that shares the same sequence as the protospacer sequence in the target DNA sequence. The spacer sequence anneals to the complement of the protospacer sequence to form a ssRNA/ssDNA hybrid structure at the target site and a corresponding R loop ssDNA structure of the endogenous DNA strand.

[0114] As used herein, a “secondary structure” of a nucleic acid molecule (e.g., an RNA fragment, or a gRNA) refers to the base pairing interactions within the nucleic acid molecule.

[0115] As used herein, the term “Cas endonuclease” or “Cas nuclease” refers to an RNA-guided DNA endonuclease associated with and/or derived from the CRISPR adaptive immunity system. The term “nickase” refers to a Cas9 or other endonuclease with one of the two nuclease domains inactivated. This enzyme is capable of cleaving only one strand of a target DNA.

[0116] Unless otherwise indicated “nuclease” and “endonuclease” are used interchangeably herein to refer to an enzyme which possesses endonucleolytic catalytic activity for polynucleotide cleavage.

[0117] The terms “polynucleotide” and “nucleic acid” are used interchangeably herein and refer to a polymeric form of nucleotides of any length, either ribonucleotides or deoxyribonucleotides. A polynucleotide can be single-, double-, or multi-stranded DNA or RNA, genomic DNA, cDNA, DNA-RNA hybrids/triple helices, or a polymer including purine and pyrimidine bases or other natural, chemically or biochemically modified, non-natural, or derivatized nucleotide bases. Any of the RNA sequences disclosed herein may also be DNA (either single-stranded or double-stranded), e.g., wherein “U” is converted to “T.” Any of the DNA sequences disclosed herein (e.g., FIG. 8-FIG. 10) may also be RNA, e.g., wherein “T” is converted to “U.”

[0118] A “functional variant” or “functional mutant”, as used herein, refers to any variant or mutant of a reference protein (e.g., a wild-type protein) that encompasses one or more alterations to the amino acid sequence of the reference protein while retaining one or more of the functions, e.g., catalytic or binding functions. In some embodiments, the one or more alterations to the amino acid sequence comprises amino acid substitutions, insertions or deletions, or any combination thereof. In some embodiments, the one or more alterations to the amino acid sequence comprises amino acid substitutions. For example, a functional variant of a reverse transcriptase may comprise one or more amino acid substitutions compared to the amino acid sequence of a wild-type reverse transcriptase but retains the ability under at least one set of conditions to catalyze the polymerization of a polynucleotide. When the reference protein is a fusion of multiple functional domains, a functional variant thereof may retain one or more of the functions of at least one of the functional domains. For example, in some embodiments, a functional fragment of a Cas9 may comprise one or more amino acid substitutions in a nuclease domain, e.g., an H840A amino acid substitution, compared to the amino acid sequence of a wild type Cas9, but retains the DNA binding ability and lacks the nuclease activity partially or completely.

[0119] As used herein, the term “binding” refers to a non-covalent interaction between macromolecules (e.g., between a protein and a nucleic acid). While in a state of non-covalent interaction, the macromolecules are said to be “associated” or “interacting” or “binding” (e.g., when a molecule X is said to interact with a molecule Y, it means that the molecule X binds to molecule Y in a non-covalent manner). Binding interactions can be characterized by a dissociation constant (K_{d}), for example a K_{d} of, or a K_{d} less than, 10⁻⁶ M, 10⁻⁷ M, 10⁻⁸ M, 10⁻⁹M, 10⁻¹⁰ M, 10⁻¹¹ M, 10⁻¹² M, 10⁻¹³ M, 10⁻¹⁴ M, 10⁻¹ M, or a number or a range between any two of these values. K_{d} can be dependent on environmental conditions, e.g., pH and temperature. “Affinity” refers to the strength of binding, and increased binding affinity is correlated with a lower K_{d}.

[0120] As used herein, the term “hybridizing” or “hybridize” refers to the pairing of substantially complementary or complementary nucleic acid sequences within two different molecules. Pairing can be achieved by any process in which a nucleic acid sequence joins with a substantially or fully complementary sequence through base pairing to form a hybridization complex. “Hybridizing” or “hybridize” can comprise denaturing the molecules to disrupt the intramolecular structure(s) (e.g., secondary structure(s)) in the molecule. In some embodiments, denaturing the molecules comprises heating a solution comprising the molecules to a temperature sufficient to disrupt the intramolecular structures of the molecules. In some instances, denaturing the molecules comprises adjusting the pH of a solution comprising the molecules to a pH sufficient to disrupt the intramolecular structures of the molecules. For purposes of hybridization, two nucleic acid sequences or segments of sequences are “substantially complementary” if at least 80% of their individual bases are complementary to one another. The complementary portion of each sequence can be referred to herein as a “segment”, and the segments are substantially complementary if they have 80% or greater identity.

[0121] The terms “complementarity” and “complementary” mean that a nucleic acid can form hydrogen bond(s) with another nucleic acid based on traditional Watson-Crick base paring rule, that is, adenine (A) pairs with thymine (T, or uracil (U) in RNA) and guanine (G) pairs with cytosine (C). Complementarity can be perfect (e.g., complete complementarity) or imperfect (e.g. partial complementarity). Perfect or complete complementarity indicates that each and every nucleic acid base of one strand is capable of forming hydrogen bonds according to Watson-Crick canonical base pairing with a corresponding base in another, antiparallel nucleic acid sequence. Partial complementarity indicates that only a percentage of the contiguous residues of a nucleic acid sequence can form Watson-Crick base pairing with the same number of contiguous residues in another, antiparallel nucleic acid sequence. In some embodiments, the complementarity can be at least 70%, 80%, 90%, 100% or a number or a range between any two of these values. In some embodiments, the complementarity is perfect, i.e., 100%. For example, the complementary candidate sequence segment is perfectly complementary to the candidate sequence segment, whose sequence can be deduced from the candidate sequence segment using the Watson-Crick base pairing rules.

[0122] As used herein, the terms “nucleic acid” and “polynucleotide” are interchangeable and refer to any nucleic acid, whether composed of phosphodiester linkages or modified linkages such as phosphotriester, phosphoramidate, siloxane, carbonate, carboxymethylester, acetamidate, carbamate, thioether, bridged phosphoramidate, bridged methylene phosphonate, bridged phosphoramidate, bridged phosphoramidate, bridged methylene phosphonate, phosphorothioate, methylphosphonate, phosphorodithioate, bridged phosphorothioate or sultone linkages, and combinations of such linkages. The terms “nucleic acid” and “polynucleotide” also specifically include nucleic acids composed of bases other than the five biologically occurring bases (adenine, guanine, thymine, cytosine and uracil).

[0123] The terms “DNA editing efficiency,” or “editing efficiency” may be used interchangeably herein and can refer to the number or proportion of intended target sequences that are edited. In some embodiments, the efficiency can be reported as % indel, e.g., the proportion of insertions and/or deletions detected in the target sequence. Indels (e.g., insertion-deletions) can result from repair of double-stranded DNA breaks caused by Cas9 cleavage by processes including, but not limited to, non-homologous end joining (NHEJ) repair. The terms “correction efficiency”, “precise correction efficiency”, or “precise edit efficiency” may be used interchangeably herein and can refer to the number or proportion of target sequences that contain the desired or intended edit. In some embodiments, the efficiency can be reported as % correction or % edit, e.g. the proportion of intended edits detected in the target sequence. In some embodiments, the intended edit or edits revert a pathogenic mutation to wildtype sequence, thereby correcting a disease-associated mutation.

[0124] The term “off-target editing frequency,” as used herein, refers to the number or proportion of unintended DNA sequences that are edited. On-target and off-target editing frequencies may be measured by the methods and assays described herein, further in view of techniques known in the art, including high-throughput sequencing reads. As used herein, high-throughput sequencing involves the hybridization of nucleic acid primers (e.g., DNA primers) with complementarity to nucleic acid (e.g., DNA) regions just upstream or downstream of the target sequence or off-target sequence of interest. Since many of the Cas9-dependent off-target sites have high sequence identity to the target site of interest, nucleic acid primers with sufficient complementarity to regions upstream or downstream of the Cas9-dependent off-target site may be designed using techniques and kits known in the art. These kits make use of polymerase chain reaction (PCR) amplification, which produces amplicons as intermediate products. The target and off-target sequences may comprise genomic loci that further comprise protospacers and PAMs. Accordingly, the term “amplicons,” as used herein, may refer to nucleic acid molecules that constitute the aggregates of genomic loci, protospacers and PAMs. High-throughput sequencing techniques used herein may further include Sanger sequencing and/or whole genome sequencing (WGS).

[0125] As used herein, the terms “transfection” or “infection” refer to the introduction of a nucleic acid into a host cell, such as by contacting the cell with liposomes or nanoparticles (e.g., lipid nanoparticles) as described herein.

[0126] As used herein, “treatment” refers to a clinical intervention made in response to a disease, disorder or physiological condition manifested by a patient or to which a patient may be susceptible. The aim of treatment includes, but is not limited to, the alleviation or prevention of symptoms, slowing or stopping the progression or worsening of a disease, disorder, or condition and/or the remission of the disease, disorder or condition. “Treatments” refer to one or both of therapeutic treatment and prophylactic or preventative measures. Subjects in need of treatment include those already affected by a disease or disorder or undesired physiological condition as well as those in which the disease or disorder or undesired physiological condition is to be prevented.

[0127] As used herein, the terms “effective amount” or “pharmaceutically effective amount” or “therapeutically effective amount” refer to an amount sufficient to effect beneficial or desirable biological and/or clinical results.

[0128] The term “pharmaceutically acceptable excipient” as used herein refers to any suitable substance that provides a pharmaceutically acceptable carrier, additive or diluent for administration of a compound(s) of interest to a subject. Pharmaceutically acceptable excipients can encompass substances referred to as pharmaceutically acceptable diluents, pharmaceutically acceptable additives, and pharmaceutically acceptable carriers.

[0129] As used herein, a “subject” refers to an animal for whom a diagnosis, treatment, or therapy is desired. In some embodiments, the subject is a mammal. “Mammal,” as used herein, refers to an individual belonging to the class Mammalia and includes, but not limited to, humans. In some embodiments, the mammal is a primate. In some embodiments, the mammal is a human. In some embodiments, the mammal is not a human. In some embodiments, the subject has or is suspected of having a disease that can be corrected via gene editing. In some embodiments, the gene editing system is an RT editing system. In some embodiments, the subject has or is suspected of having Wilson's disease. In some embodiments, the subject has or is suspected of having alpha1 antitrypsin deficiency disease. In some embodiments, the subject has or is suspected of having phenylketonuria or hyperphenylalaninemia.

### Reverse Transcriptase (RT) Editing

[0130] RT editing methods and compositions disclosed herein are directed to correction of a disease mutation using reverse transcriptase (RT) editing. Compositions disclosed herein comprise and RT editor or an mRNA encoding a reverse transcriptase (RT) editor, a long guide RNA encoding the edit designated as ‘tagRNA’, and optionally, a second guide RNA designated as ‘egRNA’ (opposite strand gRNA). In some embodiments, the composition induces programmable editing of a target DNA using an RT editor complexed with a tagRNA to incorporate an intended nucleotide edit (also referred to herein as a nucleotide change) into the target DNA. In some embodiments, the composition comprises a second guide RNA (egRNA).

[0131] A target gene of the RT editing may comprise a double stranded DNA molecule having two complementary strands: a first strand that may be referred to as a “target strand” or a “non-edit strand”, and a second strand that may be referred to as a “non-target strand,” or an “edit strand” or an “opposite strand”. The RT editors provided herein can be employed to introduce more than one nucleotide change. In some embodiments, two (or more) RT editors provided herein can be employed to edit two (or more) different genes or two (or more) different sites of a gene. RT editors provided herein can correct more than one mutation. Two disclosed RT editors can be used to target two different genes or two different segments of a gene. In some embodiments, one RT editor (e.g., as an mRNA) can be delivered with two or more different tagRNAs (and optionally egRNAs)—either in the same or different LNP formulations. The mRNA of the RT editor can be the same for any two (or more) different sites. In some embodiments, one or more different editors can be employed. In some embodiments, the target is a non-coding element, e.g., a promoter, an enhancer, and the like.

### RT Editor

[0132] The term “RT editor” refers to the polypeptide or polypeptide components involved in RT editing, or any polynucleotide(s) encoding the polypeptide or polypeptide components. In various embodiments, a RT editor includes a polypeptide domain having DNA endonuclease activity and a polypeptide domain having DNA polymerase activity. In some embodiments, the RT editor further comprises a polypeptide domain having nuclease activity. In some embodiments, the polypeptide domain having DNA binding activity comprises a nuclease domain or nuclease activity. In some embodiments, the polypeptide domain having nuclease activity comprises a nickase, or a fully active nuclease. As used herein, the term “nickase” refers to a nuclease capable of cleaving only one strand of a double-stranded DNA target. In some embodiments, the RT editor comprises a polypeptide domain that is an inactive nuclease, in some embodiments, the polypeptide domain having comprises a nucleic acid guided DNA endonuclease domain, for example, a CRISPR-Cas protein, for example, a Cas9 nickase, a Cpf1 nickase, or another CRISPR-Cas nuclease. In some embodiments, the polypeptide domain having DNA polymerase activity comprises a template-dependent DNA polymerase, for example, a DNA-dependent DNA polymerase or an RNA-dependent DNA polymerase. In some embodiments, the DNA polymerase is a reverse transcriptase, in some embodiments, the RT editor comprises additional polypeptides involved in RT editing, for example, a polypeptide domain having a 5′ endonuclease activity, e.g., a 5′ endogenous DNA flap endonucleases (e.g., FEN1), for helping to drive the RT editing process towards the edited product formation. In some embodiments, the RT editor further comprises an RNA-protein recruitment polypeptide, for example, a MS2 coat protein.

[0133] A RT editor may be engineered. In some embodiments, the polynucleotide or polypeptide components of a RT editor do not naturally occur in the same organism or cellular environment. In some embodiments, the polynucleotide or polypeptide components of a RT editor may be of different origins or from different organisms. In some embodiments, a RT editor comprises a DNA binding domain, a DNA endonuclease domain and a DNA polymerase domain that are derived from different species. In some embodiments, a RT editor comprises a Cas polypeptide (DNA endonuclease domain) and a reverse transcriptase polypeptide (DNA polymerase) that are derived from different species.

[0134] In some embodiments, polypeptide domains of a RT editor may be fused or linked by a peptide linker to form a fusion protein. In other embodiments, a RT editor comprises one or more polypeptide domains provided in trans as separate proteins, which are capable of being associated to each other through non-peptide linkages or through aptamers or recruitment sequences. For example, a RT editor may comprise a DNA binding domain and a reverse transcriptase domain associated with each other by an RNA-protein recruitment aptamer, e.g., an MS2 aptamer, which may be linked to a tagRNA. RT editor polypeptide components may be encoded by one or more polynucleotides in whole or in part, in some embodiments, a single polynucleotide, construct, or vector encodes the RT editor fusion protein. In some embodiments, multiple polynucleotides, constructs, or vectors each encode a polypeptide domain or portion of a domain of a RT editor, or a portion of a RT editor fusion protein. For example, a RT editor fusion protein may comprise an N-terminal portion fused to an intein-N and a C-terminal portion fused to an intein-C, each of which is individually encoded by an AAV vector

[0135] In some embodiments, the RT Editor is transcribed from an mRNA. In some embodiments, the mRNA comprises a 5′-cap structure. In some embodiments, the mRNA comprises a nuclear localization sequence (NLS). In some embodiments, the mRNA sequence comprises a dead Cas9 sequence. In some embodiments, the Cas9 is a Cas nickase sequence. In some embodiments, the RT Editor mRNA sequence comprises a 5′-UTR. In some embodiments, the RT Editor mRNA sequence comprises a 3′-UTR. In some embodiments, the RT Editor comprises a sequence of a viral element. In some embodiments, the viral element is a woodchuck hepatitis virus post-transcriptional regulatory element (WPRE) sequence. In some embodiments, the RT editor comprises secondary structure motifs. In some embodiments, the viral element sequence comprises or consists of any one of SEQ ID Nos: 189-190. In some embodiments, the RT editor comprises an ek5 sequence. The ek5 sequence can comprise the sequence of SEQ ID NO: 190, or a sequence that exhibits at least about 85% identity to SEQ ID NO: 190. The ek5 sequence can have one, two, three, four, or five mismatches relative to the sequence of SEQ ID NO: 190. The viral element sequence can be derived from Aichi virus 1 (AiV-1), such as, for example, the 3′ UTR K5 element (GenBank: NC_001918.1, 8,122-8,251). In some embodiments, the viral element sequence comprises the extended form of K5 (“ek5,” 8,067-8,251, 185 nt). Viral element sequences are described in Seo, Jenny J., et al. (“Functional viromic screens uncover regulatory RNA elements.” Cell 186.15 (2023): 3291-3306), the content of which is incorporated herein by reference in its entirety. In some embodiments, the secondary structure motif comprises a triple helix sequence. In some embodiments, the RT editor mRNA sequence has a structure comprising or consisting of a sequence comprising from 5′ to 3′ as [5′UTR]-[NLS]-[nCas9]-[linker]-[RT]-[NLS]-[3′UTR_and/or_viral_element]-[polyA_sequence]. In some embodiments, any nucleoside of the RT editor mRNA sequence may be chemically modified.

[0136] Compositions disclosed herein comprise a long guide RNA designated herein as “template armed guide RNA” or “tagRNA”. The tagRNA comprises a spacer sequence, a scaffold sequence, an editing template and a flap binding sequence. In some embodiments, the tagRNA comprises in 5′ to 3′ order: spacer sequence, scaffold sequence, editing template, and a flap binding sequence.

### Rt Editor Nucleotide Polymerase Domain and Endonuclease Domain

[0137] In some embodiments, a RT editor comprises a nucleotide polymerase domain, e.g., a DNA polymerase domain. The DNA polymerase domain may be a wild-type DNA polymerase domain, a full-length DNA polymerase protein domain, or may be a functional mutant, a functional variant, or a functional fragment thereof. In some embodiments, the polymerase domain is a template dependent polymerase domain. For example, the DNA polymerase may rely on a template polynucleotide strand, e.g., the editing template sequence, for new strand DNA synthesis. In some embodiments, the RT editor comprises a DNA-dependent DNA polymerase. For example, a RT editor having a DNA-dependent DNA polymerase can synthesize a new single stranded DNA using a tagRNA editing template that comprises a DNA sequence as a template. In such cases, the tagRNA is a chimeric or hybrid tagRNA, and comprising an extension arm comprising a DNA strand. The chimeric or hybrid tagRNA may comprise an RNA portion (including the spacer and the gRNA core) and a DNA portion (the extension arm comprising the editing template that includes a strand of DNA).

[0138] In some embodiments, RT editor comprises a DNA endonuclease domain (e.g., a Cas9 nickase). In some embodiments, a Cas protein, e.g., Cas9, can be a wild type or a modified form of a Cas protein. In some embodiments, a Cas protein, e.g., Cas9, can be a nuclease active variant, nuclease inactive variant, a nickase, or a functional variant or functional fragment of a wild-type Cas protein. In some embodiments, a Cas protein, e.g., Cas9, can be a wild type or a modified form of a Cas protein. A Cas protein, e.g., Cas9, can be a nuclease active variant, nuclease inactive variant, a nickase, or a functional variant or functional fragment of a wild-type Cas protein. A Cas protein, e.g., Cas9, can comprise an amino acid change such as a deletion, insertion, substitution, fusion, chimera, or any combination thereof relative to a corresponding wild-type version of the Cas protein. In some embodiments, a Cas protein can be a polypeptide with at least about 50%, 60%, 70%, 80%, 90%, 91%, 92%, 93%, 94%, 95%, 96%, 97%, 98%, 99%, or 100% sequence identity or sequence similarity to a wild type exemplary Cas protein.

[0139] A Cas protein, e.g., Cas9, may comprise one or more domains. Non-limiting examples of Cas domains include, guide nucleic acid recognition and/or binding domain, nuclease domains (e.g., DNase or RNase domains, RuvC, HNH), DNA binding domain, a DNA endonuclease domain, RNA binding domain, helicase domains, protein-protein interaction domains, and dimerization domains. In various embodiments, a Cas protein comprises a guide nucleic acid recognition and/or binding domain that can interact with a guide nucleic acid, and one or more nuclease domains that comprise catalytic activity for nucleic acid cleavage.

[0140] In some embodiments, a Cas protein, e.g., Cas9, comprises one or more nuclease domains. A Cas protein can comprise an amino acid sequence having at least about 50%, 60%, 70%, 80%, 90%, 91%, 92%, 93%, 94%, 95%, 96%, 97%, 98%, 99%, or 100% sequence identity to a nuclease domain (e.g., RuvC domain, HNH domain) of a wild-type Cas protein. In some embodiments, a Cas protein comprises a single nuclease domain. For example, a Cpf1 may comprise a RuvC domain but lacks HNH domain. In some embodiments, a Cas protein comprises two nuclease domains, e.g., a Cas9 protein can comprise an HNH nuclease domain and a RuvC nuclease domain.

[0141] In some embodiments, a RT editor comprises a Cas protein, e.g., Cas9, wherein all nuclease domains of the Cas protein are active. In some embodiments, a RT editor comprises a Cas protein having one or more inactive nuclease domains. One or a plurality of the nuclease domains (e.g., RuvC, HNH) of a Cas protein can be deleted or mutated so that they are no longer functional or comprise reduced nuclease activity. In some embodiments, a Cas protein, e.g., Cas9, comprising mutations in a nuclease domain has reduced (e.g., nickase) or abolished nuclease activity while maintaining its ability to target a nucleic acid locus at a search target sequence when complexed with a guide nucleic acid, e.g., a tagRNA.

[0142] In some embodiments, a RT editor comprises a Cas nickase that can bind to the target gene in a sequence-specific manner and generate a single-strand break at a protospacer within double-stranded DNA in the target gene, but not a double-strand break. For example, the Cas nickase can cleave the edit strand or the non-edit strand of the target gene, but may not cleave both. In some embodiments, a RT editor comprises a Cas nickase comprising two nuclease domains (e.g., Cas9), with one of the two nuclease domains modified to lack catalytic activity or deleted. In some embodiments, the Cas nickase of a RT editor comprises a nuclease inactive RuvC domain and a nuclease active HNH domain. In some embodiments, the Cas nickase of a RT editor comprises a nuclease inactive HNH domain and a nuclease active RuvC domain. In some embodiments, a RT editor comprises a Cas9 nickase having an amino acid substitution in the RuvC domain e.g., an amino acid substitution that reduces or abolishes nuclease activity of the RuvC domain. In some embodiments, the Cas9 nickase comprises a DOX amino acid substitution compared to a wild type S. pyogenes Cas9, wherein X is any amino acid other than D. In some embodiments, a RT editor comprises a Cas9 nickase having an amino acid substitution in the HNH domain, e.g., an amino acid substitution that reduces or abolishes nuclease activity of the HNH domain. In some embodiments, the Cas9 nickase comprises a H840X amino acid substitution compared to a wild type S. pyogenes Cas9, wherein X is any ammo acid other than H.

[0143] In some embodiments, a RT editor comprises a Cas protein that can bind to the target gene in a sequence-specific manner but lacks or has abolished nuclease activity and may not cleave either strand of a double stranded DNA in a target gene. Abolished activity or lacking activity can refer to an enzymatic activity less than 1%, less than 2%, less than 3%, less than 4%, less than 5%, less than 6%, less than 7%, less than 8%, less than 9%, or less than 10% activity compared to a wild-type exemplary activity (e.g., wild-type Cas9 nuclease activity). In some embodiments, a Cas protein of a RT editor completely lacks nuclease activity. A nuclease, e.g., Cas9, that lacks nuclease activity may be referred to as nuclease inactive or “nuclease dead” (abbreviated by “d”). A nuclease dead Cas protein (e.g., dCas, dCas9) can bind to a target polynucleotide but may not cleave the target polynucleotide. In some aspects, a dead Cas protein is a dead Cas9 protein. In some embodiments, a RT editor comprises a nuclease dead Cas protein wherein all of the nuclease domains (e.g., both RuvC and HNH nuclease domains in a Cas9 protein; RuvC nuclease domain in a Cpf1 protein) are mutated to lack catalytic activity, or are deleted.

[0144] A Cas protein can be modified. A Cas protein, e.g., Cas9, can be modified to increase or decrease nucleic acid binding affinity, nucleic acid binding specificity, and/or enzymatic activity. Cas proteins can also be modified to change any other activity or property of the protein, such as stability. For example, one or more nuclease domains of the Cas protein can be modified, deleted, or inactivated, or a Cas protein can be truncated to remove domains that are not essential for the function of the protein or to optimize (e.g., enhance or reduce) the activity of the Cas protein.

[0145] A Cas protein can be a fusion protein. For example, a Cas protein can be fused to a cleavage domain, an epigenetic modification domain, a transcriptional regulation domain, or a polymerase domain. A Cas protein can also be fused to a heterologous polypeptide providing increased or decreased stability. The fused domain or heterologous polypeptide can be located at the N-terminus, the C-terminus, or internally within the Cas protein.

[0146] In some embodiments, the Cas protein of a RT editor is a Class 2 Cas protein. In some embodiments, the Cas protein is a type II Cas protein. In some embodiments, the Cas protein is a Cas9 protein, a modified version of a Cas9 protein, a Cas9 protein homolog, mutant, variant, or a functional fragment thereof. As used herein, a Cas9, Cas9 protein, Cas9 polypeptide or a Cas9 nuclease refers to an RNA guided nuclease comprising one or more Cas9 nuclease domains and a Cas9 gRNA binding domain having the ability to bind a guide polynucleotide, e.g., a tagRNA. A Cas9 protein may refer to a wild-type Cas9 protein from any organism or a homolog, ortholog, or paralog from any organisms; any functional mutants or functional variants thereof, or any functional fragments or domains thereof. In some embodiments, a RT editor comprises a full-length Cas9 protein. In some embodiments, the Cas9 protein can generally comprises at least about 50%, 60%, 70%, 80%, 90%, 100% sequence identity to a wild-type reference Cas9 protein (e.g., Cas9 from S. pyogenes). In some embodiments, the Cas9 comprises an amino acid change such as a deletion, insertion, substitution, fusion, chimera, or any combination thereof as compared to a wild-type reference Cas9 protein.

[0147] In some embodiments the DNA endonuclease domain of the RT editor comprises a Cas9 protein (e.g., a Cas9 nickase). The Cas9 protein can comprise an amino acid sequence that is at least 80% identical to any one of SEQ ID NOS: 142-163 and 270-314. The Cas9 protein can comprise an amino acid sequence having one, two, three, four, or five mismatches relative to the sequence of any one of SEQ ID NOS: 142-163 and 270-314.

### Reverse Transcriptases

[0148] In some embodiments, a RT editor comprises an RNA-dependent DNA polymerase domain, for example, a reverse transcriptase (RT). An RT or an RT domain may be a wild-type RT domain, a full-length RT domain, or may be a functional mutant, a functional variant, or a functional fragment thereof. An RT or an RT domain of a RT editor may comprise a wild-type RT, or may be engineered or evolved to contain specific amino acid substitutions, truncations, or variants. An engineered RT may comprise sequences or amino acid changes different from a naturally occurring RT. In some embodiments, the engineered RT may have improved reverse transcription activity over a naturally occurring RT or RT domain. In some embodiments, the engineered RT may have improved features over a naturally occurring RT, for example, improved thermostability, reverse transcription efficiency, or target fidelity. In some embodiments, a RT editor comprising the engineered RT has improved RT editing efficiency over a RT editor having a reference naturally occurring RT.

[0149] In some embodiments, a RT editor comprises a virus RT, for example, a retrovirus RT. Nonlimiting examples of virus RT include Moloney murine leukemia virus (M-MLV or MLVRT or M-MLV RT); human T-cell leukemia virus type 1 (HTLV-1) RT; bovine leukemia virus (BLV) RT; Rous Sarcoma Virus (RSV) RT; human immunodeficiency virus (HIV) RT, M-MFV RT, Avian Sarcoma-Leukosis Virus (ASLV) RT, Rous Sarcoma Virus (RSV) RT, Avian Myeloblastosis Virus (AMV) RT, Avian Erythroblastosis Virus (AEV) Helper Virus MCAV RT, Avian Myelocytomatosis Virus MC29 Helper Virus MCAV RT, Avian Reticuloendotheliosis Virus (REV-T) Helper Virus REV-A RT, Avian Sarcoma Virus UR2 Helper Virus (LJR2AV) RT, Avian Sarcoma Virus Y73 Helper Virus YAV RT, Rous Associated Virus (RAV) RT, and Myeloblastosis Associated Virus (MAV) RT, all of which may be suitably used in the methods and composition described herein. In some embodiments, an MMLV RT, e.g., reference MMLV RT, comprises a sequence as disclosed in SEQ ID NO: 15.

[0150] In some embodiments, the RT editor comprises a wild-type M-MLV RT, a functional mutant, a functional variant, or a functional fragment thereof. In some embodiments, the RT editor comprises a reference M-MLV RT, a functional mutant, a functional variant, or a functional fragment thereof.

[0151] In some embodiments, the RT is an RT (e.g., a retro-transposon RT) from an avian genome. The avian may be of the order Gallformes, Aseriformes, Passeriformes, Gruiformes, Struthioniformes, Rheiformes, Casuariformes, Apyerygiformes, Otidiformes, Columbiformes, Sphenisciformes, Cathartiformes, Accipitriformes, Strigiformes, Psittaciformes, Charadriiformes, or Falconiformes. Exemplary avians include those of Galiformes (e.g. chicken, quails, and turkey), Anseriformes (e.g. duck, and goose), Charadriiformes (e.g. gull, barred button quail, and plover), Columbiformes (e.g. pigeon), Struthioniformes (e.g. ostrich), Passeriformes (e.g. crow, finch, sparrow, starling, and swallow), Psittaciformes (e.g. parrot), Falconiformes (e.g. eagle, and falcon), Strigiformes (e.g. owl), Sphenisciformes (e.g. penguin), and Psittaciformes (e.g. parakeet, and parrot). The avian can belong to the order Passeriformes. The avian can belong to the family Passerellidae. The avian can belong to the genus Melospiza. In some embodiments, the RT is from the genome of M. georgiana. In some embodiments, the M. georgiana RT is an engineered RT. In some embodiments, the mutation sites on the M. georgiana RT may be one or more of G206N, M312K, W319F, E336P, and L611W. The DNA polymerase domain (e.g., RT) can comprise an amino acid sequence that is at least about 80% identical to SEQ ID NO: 141 (e.g., 80%, 81%, 82%, 83%, 84%, 85%, 86%, 87%, 88%, 89%, 90%, 91%, 92%, 93%, 94%, 95%, 96%, 97%, 98%, 99%, 100%, or a number or a range between any two of these values, identical to SEQ ID NO: 141). The DNA polymerase domain (e.g., RT) can comprise an amino acid sequence having one, two, three, four, five, six, seven, eight, nine, or ten mismatches relative to the sequence of SEQ ID NO: 141. There are provided, in some embodiments, RT editors. The RT editor can comprise a DNA endonuclease domain, a DNA binding domain and a DNA polymerase domain. The DNA polymerase domain can comprise an amino acid sequence that is at least 80% identical to SEQ ID NO: 141. The DNA polymerase domain can comprise an amino acid sequence having one, two, three, four, or five mismatches relative to the sequence of SEQ ID NO: 141. In some embodiments, the RT editor comprises a reverse transcriptase has a sequence of any one of SEQ ID NOs: 141, 250-269, 315-319, 899-909, and 1015-1018. In certain embodiments, the reverse transcriptase comprises an amino acid sequence that is at least 80% identical to SEQ ID NO: 141.

[0152] In some embodiments, the RT is an RT from a mammalian genome. In some embodiments, the mammal may be of the order Chiroptera (bat). That bat can be of the family Phyllostomidae (e.g., leaf-nosed bats), Noctilionidae (bulldog bats), Cistugidae, Thyropteridae (e.g., disk-winged bats), Molossidae (e.g., free-tailed bats), Miniopteridae (e.g., long winged bat), Mormoopidae, Mystacinidae (e.g., New Zealand short-tailed bats), Myzopodidae (e.g., sucker-footed bats), Natalidae (e.g., funnel-eared bats), Emballonuridae (e.g., sheath-tailed bats), Nycteridae (e.g., slit-faced bats), Furipteridae (e.g., smoky bats), Vespertilionidae (e.g., vesper bats), Craseonycteridae, Megadermatidae (e.g., false vampire bats), Rhinolophidae (e.g., horseshoe bats), Pteropodidae (e.g., Old World fruit bats), Hipposideridae (e.g., Old World leaf-nosed bats), or Rhinopomatidae. In some embodiments, the bat is of the genus Myotis, Pipistrelles, or Eptesicus. In some embodiments, the bat species is M. brandtii, M. daubentonii, P. kuhli, or E. nilssonii. In some embodiments, the RT editor comprises a reverse transcriptase having a sequence of any one of SEQ ID NOs: 250-255, 258-259, and 266-267. In some embodiments, the reverse transcriptase comprises an amino acid sequence that is at least 80% identical to any one of SEQ ID NOs: 250-255, 258-259, and 266-267.

[0153] In some embodiments, the DNA polymerase domain comprises a reverse transcriptase. In some embodiments, the DNA polymerase domain comprises a reverse transcriptase comprising one or more mutations. In some embodiments, at least one of the one or more mutations is at an amino acid position functionally equivalent to V101, N200, A208, G248, P330, L435, K445, and/or A623 relative to SEQ ID NO: 8.

[0154] In some embodiments, the DNA polymerase domain comprises a reverse transcriptase comprising an amino acid sequence that is at least 80% identical to SEQ ID NO: 255 (e.g., 80%, 81%, 82%, 83%, 84%, 85%, 86%, 87%, 88%, 89%, 90%, 91%, 92%, 93%, 94%, 95%, 96%, 97%, 98%, 99%, 100%, or a number or a range between any two of these values, identical to SEQ ID NO: 255). In some embodiments, the reverse transcriptase comprises one or more mutations. In some embodiments, at least one of the one or more mutations is at amino acid position V98, N197, A205, S245, P327, V432, R442, and/or A623 relative to SEQ ID NO: 255. In some embodiments, the reverse transcriptase comprises one or more transition mutations selected from the group consisting of V98R, N197C, N197D, N197G, A205T, S245C, P327E, P327Q, V432K, R442T, and A623F relative to SEQ ID NO: 255.

[0155] In some embodiments, the DNA polymerase domain comprises a reverse transcriptase comprising an amino acid sequence that is at least 80% identical to SEQ ID NO: 260 (e.g., 80%, 81%, 82%, 83%, 84%, 85%, 86%, 87%, 88%, 89%, 90%, 91%, 92%, 93%, 94%, 95%, 96%, 97%, 98%, 99%, 100%, or a number or a range between any two of these values, identical to SEQ ID NO: 260). The reverse transcriptase can comprise one or more mutations. In some embodiments, at least one of the one or more mutations is at amino acid position V106, N204, E212, G252, P334, L440, E450, and/or A629 relative to SEQ ID NO: 260. In some embodiments, the reverse transcriptase comprises one or more transition mutations selected from the group consisting of V106R, N204C, N204D, N204G, E212T, G252C, P334E, P334Q, L440K, E450T, and/or A629F relative to SEQ ID NO: 260.

[0156] In some embodiments, the DNA polymerase domain comprises a reverse transcriptase comprising an amino acid sequence that is at least 80% identical to SEQ ID NO: 255. In some embodiments, the reverse transcriptase comprises an N197C or V98R transition mutation relative to SEQ ID NO: 255 (e.g., 80%, 81%, 82%, 83%, 84%, 85%, 86%, 87%, 88%, 89%, 90%, 91%, 92%, 93%, 94%, 95%, 96%, 97%, 98%, 99%, 100%, or a number or a range between any two of these values, identical to SEQ ID NO: 255).

[0157] In some embodiments, the DNA polymerase domain comprises a reverse transcriptase comprising an amino acid sequence that is at least 80% identical to SEQ ID NO: 260 (e.g., 80%, 81%, 82%, 83%, 84%, 85%, 86%, 87%, 88%, 89%, 90%, 91%, 92%, 93%, 94%, 95%, 96%, 97%, 98%, 99%, 100%, or a number or a range between any two of these values, identical to SEQ ID NO: 260). In some embodiments, the reverse transcriptase comprises an N204C and/or V106R transition mutation relative to SEQ ID NO: 260.

### Accessory Domains

[0158] In some embodiments, the RT editor further comprises an accessory domain. In some embodiments, the accessory domain comprises a single-strand binding (SSB) protein domain or a stabilon. In some embodiments, the SSB protein domain is derived from RecA protein, Sso7d protein, or Sto7d protein. In some embodiments the accessory domain is situated at the N-terminus, the C-terminus, or at an internal location of the RT editor. In some embodiments, the RT editor comprising an accessory domain comprises an amino acid sequence that is at least 85% identical to any one of SEQ ID NOs: 1276-1298 (e.g., 85%, 86%, 87%, 88%, 89%, 90%, 91%, 92%, 93%, 94%, 95%, 96%, 97%, 98%, 99%, 100%, or a number or a range between any two of these values, identical to any one of SEQ ID NOs: 1276-1298). In some embodiments, the SSB protein domain is derived from Sso7d and comprises one or more mutations at an amino acid position functionally equivalent to K12 and/or E35 of a wild type Sso7d amino acid sequence. In some embodiments, the one or more mutations comprise K12L and/or E35L relative to a wild type Sso7d sequence. In some embodiments, the SSB protein domain comprises an amino acid sequence that is at least 85% identical to SEQ ID NO: 1205 (e.g., 85%, 86%, 87%, 88%, 89%, 90%, 91%, 92%, 93%, 94%, 95%, 96%, 97%, 98%, 99%, 100%, or a number or a range between any two of these values, identical to SEQ ID NO: 1205). In some embodiments, the RT editor comprising the SSB protein domain comprises from N-terminus to C-terminus: [N-terminus of nCas9]-[linker]-[SSB protein domain]-[linker]-[RT]-[linker]-[C-terminus of nCas9]. In some embodiments, the N-terminus of nCas9 comprises an amino acid sequence functionally equivalent to amino acids 1-1247 of SEQ ID NO: 6 and/or the C-terminus of nCas9 comprises an amino acid sequence functionally equivalent to amino acids 1248-1367 of SEQ ID NO: 6. In some embodiments, the RT editor comprising the SSB protein domain comprises an amino acid sequence that is at least 85% identical to any one of SEQ ID NOs: 1207-1209 (e.g., 85%, 86%, 87%, 88%, 89%, 90%, 91%, 92%, 93%, 94%, 95%, 96%, 97%, 98%, 99%, 100%, or a number or a range between any two of these values, identical to any one of SEQ ID NOs: 1207-1209).

Additional Sequence Elements of the RT Editor mRNA

[0159] The present disclosure provides optimized mRNAs encoding a RT editor, that provide effective genome editing of a target cell population when administered with one or more gRNAs (e.g., tagRNA and egRNA). In some embodiments, additional segmented polyA sequences increase mRNA stability and half-life of the RT editor. In some embodiments, the disclosure provides an mRNA comprising (i) a 5′-cap, (ii) a 5′-untranslated region (UTR); (ii) an open reading frame (ORF) comprising a nucleotide sequence that encodes a RT editor; and (iv) a 3′ untranslated region (UTR). In some embodiments, the mRNA further comprises viral element sequences 3′ of the 3′-UTR. In some embodiments, the viral element sequence comprises the sequence of SEQ ID NO: 189. In some embodiments, the mRNA further comprises an eK5 sequence that is located 3′ of the 3′-UTR. eK5 is a regulatory RNA element derived from a virus that when placed in the 3′UTR of an mRNA can lead to increased protein expression (for instance, as in Seo et al Cell 2023, 186: 3291). In some embodiments, the ek5 sequence comprises the sequence of SEQ ID NO: 190. In some embodiments, the synthetic triple helix secondary structure sequence (STH) comprises the sequence derived from a sequence element of the long non-coding RNA, such as MALAT1. In some embodiments, the STH sequence comprises the sequence of SEQ ID NO: 246. FIG. 6-FIG. 10 provide exemplary secondary structure motifs employed in the methods and compositions provided herein. In some embodiments their presence in the 3′ UTR of mRNAs disclosed herein provides 3′ end stabilization and/or protection. Some embodiments provided herein employ the triple helix motif from MALAT1, or an engineered (minimal) version. In some embodiments, MALAT1 (Gene ID: 378938) based triple helix motif is situated at the 3′ end. MALAT1 (metastasis associated lung adenocarcinoma transcript 1) also known as NEAT2 (noncoding nuclear-enriched abundant transcript 2) is a large, infrequently spliced non-coding RNA, which is highly conserved amongst mammals and highly expressed in the nucleus.

tagRNAs

[0160] Disclosed herein include target priming RNAs (tagRNAs). The term “target priming RNA”, or “tagRNA”, refers to a guide polynucleotide that comprises one or more intended nucleotide edits for incorporation into the target DNA. In some embodiments, the tagRNA associates with and directs a RT editor to incorporate the one or more intended nucleotide edits into the target gene via RT editing. “Nucleotide edit” or “intended nucleotide edit” refers to a specified deletion of one or more nucleotides at one specific position, insertion of one or more nucleotides at one specific position, substitution of a single nucleotide, or other alterations at one specific position to be incorporated into the sequence of the target gene. Intended nucleotide edit may refer to the edit on the editing template as compared to the sequence on the target strand of the target gene or may refer to the edit encoded by the editing template on the newly synthesized single stranded DNA that replaces the editing target sequence, as compared to the editing target sequence. In some embodiments, a tagRNA comprises a spacer sequence that is complementary or substantially complementary to a search target sequence on a target strand of the target gene, in some embodiments, the tagRNA comprises a gRNA core that associates with a DNA endonuclease domain, e.g., a CRISPR-Cas protein domain, of a RT editor. In some embodiments, the tagRNA further comprises an extended nucleotide sequence comprising one or more intended nucleotide edits compared to the endogenous sequence of the target gene, wherein the extended nucleotide sequence may be referred to as an extension arm.

[0161] In some embodiments, in a template armed gRNA (tagRNA), a spacer sequence is complementary or substantially complementary to a specific sequence on the target strand, which may be referred to as a “search target sequence.” In some embodiments, the spacer sequence anneals with the target strand at the search target sequence. The target strand may also be referred to as the “non-Protospacer Adjacent Motif (non-PAM strand).” In some embodiments, the non-target strand may also be referred to as the “PAM strand.” In some embodiments, the PAM strand comprises a protospacer sequence and optionally a protospacer adjacent motif (PAM) sequence. In RT editing using a Cas-protein-based RT editor, a PAM sequence refers to a short DNA sequence immediately adjacent to the protospacer sequence on the PAM strand of the target gene. A PAM sequence may be specifically recognized by a programmable DNA binding protein, e.g., a Cas nickase or a Cas nuclease, in some embodiments, a specific PAM is characteristic of a specific programmable DNA binding protein, e.g., a Cas nickase or a Cas nuclease. A protospacer sequence refers to a specific sequence in the PAM strand of the target gene that is complementary to the search target sequence. In a tagRNA, a spacer sequence may have a substantially identical sequence as the protospacer sequence on the edit strand of a target gene, except that the spacer sequence may comprise Uracil (U) and the protospacer sequence may comprise Thymine (T).

[0162] In some embodiments, the double stranded target DNA comprises a nick site on the PAM strand (or non-target strand). As used herein, a “nick site” refers to a specific position in between two nucleotides or two base pairs of the double stranded target DNA. In some embodiments, the position of a nick site is determined relative to the position of a specific PAM sequence. In some embodiments, the nick site is the particular position where a nick will occur when the double stranded target DNA is contacted with a nickase, for example, a Cas nickase, that recognizes a specific PAM sequence. In some embodiments, the nick site is upstream of a specific PAM sequence on the PAM strand of the double stranded target DNA. In some embodiments, the nick site is downstream of a specific PAM sequence on the PAM strand of the double stranded target DNA. In some embodiments, the nick site is upstream of a PAM sequence recognized by a Cas9 nickase, wherein the Cas9 nickase comprises a nuclease active RuvC domain and a nuclease inactive HNH domain. In some embodiments, the nick site is 3 nucleotides upstream of the PAM sequence, and the PAM sequence is recognized by a Streptococcus pyogenes Cas9 nickase. In some embodiments, the Cas nickase comprises any one of the sequences recited in SEQ ID NO: 142-163.

[0163] In some embodiments, the nick site is 3 base pairs upstream of the PAM sequence, and the PAM sequence is recognized by a Cas9 nickase, wherein the Cas9 nickase comprises a nuclease active HNH domain and a nuclease inactive RuvC domain. In some embodiments, the nick site is 2 nucleotides upstream of the PAM sequence, and the PAM sequence is recognized by a S. thermophilus Cas9 nickase that comprises a nuclease active RuvC domain and a nuclease inactive HNH domain. In some embodiments, the Cas nick site (e.g., a Cas9 nickase comprising an amino acid sequence that is at least 80% identical (e.g., 80%, 81%, 82%, 83%, 84%, 85%, 86%, 87%, 88%, 89%, 90%, 91%, 92%, 93%, 94%, 95%, 96%, 97%, 98%, 99%, 100%, or a number or a range between any two of these values) to any one of SEQ ID NOs: 142-163 and 270-314, or an amino acid sequence having at least one, at least two, at least three, at least four, or at least five mismatches relative to the sequence of any one of SEQ ID NOs: 142-163 and 270-314), is 4, 5, 6 or more than 6 nucleotides base pairs upstream of the PAM sequence and the PAM sequence is recognized by a Cas9 nickase wherein the Cas9 nickase comprises a nuclease active HNH domain and a nuclease inactive RuvC domain.

[0164] An “editing template” of a tagRNA is a single-stranded portion of the tagRNA that is 5′ of the FB sequence and comprises a region of complementarity to the PAM strand (i.e., the non-target strand or the edit strand), and comprises one or more intended nucleotide edits compared to the endogenous sequence of the double stranded target DNA. In some embodiments, the editing template and the FB sequence are immediately adjacent to each other. Accordingly, in some embodiments, a tagRNA in RT editing comprises a single-stranded portion that comprises the editing template sequence and the FB sequence immediately adjacent to each other. In some embodiments, the single stranded portion of the tagRNA comprising both the editing template sequence and the flap binding sequence is complementary or substantially complementary to an endogenous sequence on the PAM strand (i.e., the non-target strand or the edit strand) of the double stranded target DNA except for one or more non-complementary nucleotides at the intended nucleotide edit positions. As used herein, regardless of relative 5-3′ positioning in other contexts, the relative positions as between the FB sequence and the editing template, and the relative positions as among elements of a tagRNA, are determined by the 5′ to 3′ order of the tagRNA as a single molecule regardless of the position of sequences in the double stranded target DNA that may have complementarity or identity to elements of the tagRNA. In some embodiments, the editing template is complementary or substantially complementary to a sequence on the PAM strand that is immediately downstream of the nick site, except for one or more non-complementary nucleotides at the intended nucleotide edit positions. The endogenous, e.g., genomic, sequence that is complementary or substantially complementary to the editing template, except for the one or more non-complementary nucleotides at the position corresponding to the intended nucleotide edit, may be referred to as an “editing target sequence.” In some embodiments, the editing template has identity or substantial identity to a sequence on the target strand that is complementary to, or having the same position in the genome as, the editing target sequence, except for one or more insertions, deletions, or substitutions at the intended nucleotide edit positions. In some embodiments, the editing template encodes a single stranded DNA, wherein the single stranded DNA has identity or substantial identity to the editing target sequence except for one or more insertions, deletions, or substitutions at the positions of the one or more intended nucleotide edits.

[0165] In some embodiments, the editing template comprises a nucleotide sequence selected from SEQ ID NOs: 95-98. In some embodiments, the editing template comprises a nucleotide sequence selected from SEQ ID NOs: 95-98 or a sequence having one, two, or three mismatches relative to a nucleotide sequence selected from SEQ ID NOs: 95-98. In some embodiments, the editing template comprises or consists of a nucleotide sequence selected from SEQ ID NOs: 95-98 or a sequence at least 85% identical (e.g., 85%, 86%, 87%, 88%, 89%, 90%, 91%, 92%, 93%, 94%, 95%, 96%, 97%, 98%, 99%, 100%, or a number or a range between any two of these values) to a nucleotide sequence selected from SEQ ID NOs: 95-98.

[0166] A “flap binding (FB) sequence” is a single-stranded portion of the tagRNA that comprises a region of complementarity to the PAM strand (i.e., the non-target strand or the edit strand). The FB sequence is complementary or substantially complementary to a sequence on the PAM strand of the double stranded target DNA that is immediately upstream of the nick site. In some embodiments, in the process of RT editing, the tagRNA complexes with and directs a RT editor to bind the search target sequence on the target strand of the double stranded target DNA and the RT editor generates a nick at the nick site on the non-target strand (e.g., the PAM strand) of the double stranded target DNA. In some embodiments, the FB sequence is complementary to or substantially complementary to, and can anneal to, a free 3′ end on the non-target strand of the double stranded target DNA at the nick site. In some embodiments, the FB sequence annealed to the free 3′ end on the non-target strand can initiate target-primed DNA synthesis. In some embodiments, the FB sequence is about 2 to 20 nucleotides in length. In some embodiments, the FB sequence is about 8 to 16 nucleotides in length. In some embodiments, the FBS is 6 nucleotides in length. In some embodiments, the FB site comprises a nucleotide sequence selected from GGCGTGGCAGTCA (SEQ ID NO: 91), GGCGTGGCAGTC (SEQ ID NO: 92), GGCGTGGCAGT (SEQ ID NO: 93), GGCGTGGCAG (SEQ ID NO: 94), GGCGTGGCA, GGCGTGGC, GGCGTGG, and GGCGTG. In some embodiments, the FB sequence comprises a nucleotide sequence selected from GGCGTGGCAGTCA (SEQ ID NO: 91), GGCGTGGCAGTC (SEQ ID NO: 92), GGCGTGGCAGT (SEQ ID NO: 93), GGCGTGGCAG (SEQ ID NO: 94), GGCGTGGCA, GGCGTGGC, GGCGTGG, and GGCGTG. In some embodiments, the FB sequence comprises a nucleotide sequence having one, two, or three mismatches relative to a sequence selected from GGCGTGGCAGTCA (SEQ ID NO: 91), GGCGTGGCAGTC (SEQ ID NO: 92), GGCGTGGCAGT (SEQ ID NO: 93), GGCGTGGCAG (SEQ ID NO: 94), GGCGTGGCA, GGCGTGGC, GGCGTGG, and GGCGTG. In some embodiments, the FB sequence comprises or consists of a sequence selected from GGCGTGGCAGTCA (SEQ ID NO: 91), GGCGTGGCAGTC (SEQ ID NO: 92), GGCGTGGCAGT (SEQ ID NO: 93), GGCGTGGCAG (SEQ ID NO: 94), GGCGTGGCA, GGCGTGGC, GGCGTGG, and GGCGTG or a sequence at least 85% identical (e.g., 85%, 86%, 87%, 88%, 89%, 90%, 91%, 92%, 93%, 94%, 95%, 96%, 97%, 98%, 99%, 100%, or a number or a range between any two of these values) to a sequence selected from GGCGTGGCAGTCA (SEQ ID NO: 91), GGCGTGGCAGTC (SEQ ID NO: 92), GGCGTGGCAGT (SEQ ID NO: 93), GGCGTGGCAG (SEQ ID NO: 94), GGCGTGGCA, GGCGTGGC, GGCGTGG, and GGCGTG.

### Nucleic Acid Modifications

[0167] In some embodiments, any of the nucleic acids of the disclosure can comprise one or more modifications (e.g., gRNA, tagRNA, egRNA, or any nucleic acid encoding any component of the RT editor systems disclosed herein). In some embodiments, the gRNA (e.g., egRNA) or tagRNA is a chemically modified gRNA or tagRNA. Various types of RNA modifications can be introduced to the gRNAs or tagRNAs to enhance stability, reduce the likelihood or degree of innate immune response, and/or enhance other attributes as described in the art. The gRNAs or tagRNAs described herein can comprise one or more modifications including internucleoside linkages, purine or pyrimidine bases, or sugar. In some embodiments, a modification is introduced at the terminal of a gRNA or tagRNA with chemical synthesis or with a polymerase enzyme. Examples of modified nucleic acids and their synthesis are disclosed in WO2013/052523. Synthesis of modified polynucleotides is also described in Verma and Eckstein, Annual Review of Biochemistry, vol. 76, 99-134 (1998).

[0168] In some embodiments, programmable editing of a target DNA comprises a template armed gRNA (tagRNA). In some embodiments, one or more nucleoside of the tagRNA is chemically modified. In some embodiments, the chemical modifications can be any one of an LNA, 2′-fluoro, DNA, 2′-OMe, and 2′ MethoxyEthoxy (2′-MOE)-chemical modification. In some embodiments, the tagRNA comprises one or more deoxyribonucleotides (e.g., DNA). In some embodiments, each nucleotide of the editing template comprises an LNA modification. In some embodiments, each nucleotide of the flap binding sequence comprises an LNA modification. In some embodiments, each nucleotide of both the editing template and the flap binding sequences comprises an LNA modification. In some embodiments, every second nucleotide of the editing template comprises an LNA modification. In some embodiments, every second nucleotide of the flap binding sequence comprises an LNA modification. In some embodiments, every second nucleotide of both the editing template and the flap binding sequences comprises an LNA modification. In some embodiments, every third nucleotide of the editing template comprises an LNA modification. In some embodiments, every third nucleotide of the flap binding sequence comprises an LNA modification. In some embodiments, every third nucleotide of both the editing template and the flap binding sequences comprises an LNA modification. In some embodiments, each nucleotide of the editing template comprises a 2′-fluoro modification. In some embodiments, each nucleotide of the flap binding sequence comprises a 2′-fluoro modification. In some embodiments, each nucleotide of both the editing template and the flap binding sequences comprises a 2′-fluoro modification. In some embodiments, every second nucleotide of the editing template comprises a 2′-fluoro modification. In some embodiments, every second nucleotide of the flap binding sequence comprises a 2′-fluoro modification. In some embodiments, every second nucleotide of both the editing template and the flap binding sequences comprises a 2′-fluoro modification. In some embodiments, every third nucleotide of the editing template comprises a 2′-fluoro modification. In some embodiments, every third nucleotide of the flap binding sequence comprises a 2′-fluoro modification. In some embodiments, every third nucleotide of both the editing template and the flap binding sequences comprises a 2′-fluoro modification. In some embodiments, each nucleotide of the editing template comprises a 2′-OMe modification. In some embodiments, each nucleotide of the flap binding sequence comprises a 2′-OMe modification. In some embodiments, each nucleotide of both the editing template and the flap binding sequences comprises a 2′-OMe modification. In some embodiments, every second nucleotide of the editing template comprises a 2′-OMe modification. In some embodiments, every second nucleotide of the flap binding sequence comprises a 2′-OMe modification. In some embodiments, every second nucleotide of both the editing template and the flap binding sequences comprises a 2′-OMe modification. In some embodiments, every third nucleotide of the editing template comprises a 2′-OMe modification. In some embodiments, every third nucleotide of the flap binding sequence comprises a 2′-OMe modification. In some embodiments, every third nucleotide of both the editing template and the flap binding sequences comprises a 2′-OMe modification. In some embodiments, each nucleotide of the editing template comprises a 2′-MOE modification. In some embodiments, each nucleotide of the flap binding sequence comprises a 2′-MOE modification. In some embodiments, each nucleotide of both the editing template and the flap binding sequences comprises a 2′-MOE modification. In some embodiments, every second nucleotide of the editing template comprises a 2′-MOE modification. In some embodiments, every second nucleotide of the flap binding sequence comprises a 2′-MOE modification. In some embodiments, every second nucleotide of both the editing template and the flap binding sequences comprises a 2′-MOE modification. In some embodiments, every third nucleotide of the editing template comprises a 2′-MOE modification. In some embodiments, every third nucleotide of the flap binding sequence comprises a 2′-MOE modification. In some embodiments, every third nucleotide of both the editing template and the flap binding sequences comprises a 2′-MOE modification. In some embodiments, the total number of tagRNA nucleotides comprising a chemical modification provided herein (e.g., an LNA, 2′-fluoro, DNA, 2′-OMe, and/or 2′-MOE chemical modification) can be at least, or can be at most, 1, 2, 3, 4, 5, 6, 7, 8, 9, 10, 11, 12, 13, 14, 15, 16, 17, 18, 19, 20, 21, 22, 23, 24, 25, 26, 27, 28, 29, 30, 31, 32, 33, 34, 35, 36, 37, 38, 39, 40, 41, 42, 43, 44, 45, 46, 47, 48, 49, 50, 51, 52, 53, 54, 55, 56, 57, 58, 59, 60, 61, 62, 63, 64, 65, 66, 67, 68, 69, 70, 71, 72, 73, 74, 75, 76, 77, 78, 79, 80, 81, 82, 83, 84, 85, 86, 87, 88, 89, 90, 91, 92, 93, 94, 95, 96, 97, 98, 99, or 100, nucleotides. As understood by the skilled artisan, any modification pattern disclosed herein (e.g., according to any of SEQ ID NOs: 16-47, 99-130, 164-181, 320-497, 563-682, 791-792, 1046-1053, and 1089-1203) can be applied to a tagRNA comprising a desired spacer and editing template.

[0169] In some embodiments, a tagRNA complexes with and directs a RT editor to bind to the search target sequence of the target gene. In some embodiments, the bound RT editor generates a nick on the edit strand (PAM strand) of the target gene at the nick site. In some embodiments, a flap binding site (FB sequence) of the tagRNA anneals with a free 3′ end formed at the nick site, and the RT editor initiates DNA synthesis from the nick site, using the free 3′ end as a primer. Subsequently, a single-stranded DNA encoded by the editing template of the tagRNA is synthesized. In some embodiments, the newly synthesized single-stranded DNA comprises one or more intended nucleotide edits compared to an endogenous target gene sequence. Accordingly, in some embodiments, the editing template of a tagRNA is complementary to a sequence in the edit strand except for one or more mismatches at the intended nucleotide edit positions in the editing template. The endogenous, e.g., genomic, sequence that is partially complementary to the editing template may be referred to as an “editing target sequence.” Accordingly, in some embodiments, the newly synthesized single stranded DNA has identity or substantial identity to a sequence in the editing target sequence, except for one or more insertions, deletions, or substitutions at the intended nucleotide edit positions.

[0170] In some embodiments, the newly synthesized single-stranded DNA equilibrates with the editing target on the edit strand of the target gene for pairing with a target strand of a target gene. In some embodiments, an editing target sequence of a target gene is excised by a flap endonuclease (FEN), for example, FEN1. In some embodiments, the FEN is an endogenous FEN, for example, in a cell comprising a target gene. In some embodiments, the FEN is provided as part of the RT editor, either linked to other components of the RT editor or provided in trans. In some embodiments, the newly synthesized single stranded DNA, which comprises the intended nucleotide edit, replaces the endogenous single stranded editing target sequence on the edit strand of the target gene. In some embodiments, the newly synthesized single stranded DNA and the endogenous DNA on the target strand form a heteroduplex DNA structure at the region corresponding to the editing target sequence of the target gene. In some embodiments, the newly synthesized single-stranded DNA comprising the nucleotide edit is paired in the heteroduplex with the target strand of the target DNA that does not comprise the nucleotide edit, thereby creating a mismatch between the two otherwise complementary strands. In some embodiments, the mismatch is recognized by DNA repair machinery, e.g., an endogenous DNA repair machinery. In some embodiments, through DNA repair, the intended nucleotide edit is incorporated into the target gene.

[0171] In some embodiments, a RT editor comprises a Cas9 functional variant that is of smaller molecular weight than a wild-type SPYCas9 protein. In some embodiments, a smaller-sized Cas9 functional variant may facilitate delivery to cells, e.g., by an expression vector, nanoparticle, or other means of delivery. In some embodiments, a smaller-sized Cas9 functional variant is a Class 2 Type II Cas protein. In some embodiments, a smaller-sized Cas9 functional variant is a Class 2 Type V Cas protein. In some embodiments, a smaller-sized Cas9 functional variant is a Class 2 Type VI Cas protein.

### Nuclear Localization Sequences and Linkers

[0172] In some embodiments, a RT editor further comprises one or more nuclear localization sequence (NLS). In some embodiments, the NLS helps promote translocation of a protein into the cell nucleus. In some embodiments, a RT editor comprises a fusion protein, e.g., a fusion protein comprising a DNA endonuclease domain and a DNA polymerase, that comprises one or more NLSs. In some embodiments, one or more polypeptides of the RT editor are fused to or linked to one or more NLSs. In some embodiments, the RT editor comprises a DNA endonuclease domain and a DNA polymerase domain that are provided in trans, wherein the DNA endonuclease domain and/or the DNA polymerase domain is fused or linked to one or more NLSs. In some embodiments the RT editor mRNA comprises or consists of the structure: [5′UTR]-[NLS]-[nCas9]-[linker]-[RT]-[NLS]-[3′UTR and/or viral element]-[polyA sequence]. The RT editor mRNA can comprises or consist of the structure [5′-cap]-[5′UTR]-[NLS]-[nCas9]-[linker and/or NLS]-[RT]-[NLS]-[3′UTR_and/or_viral_element]-[secondary structure motif and/or polyA sequence]. In some cases, the positions of nCas9 and RT are swapped to e.g. improve editing efficiency.

[0173] In some embodiments, a RT editor or RT editing complex comprises at least one NLS. In some embodiments, a RT editor or RT editing complex comprises at least two NLSs. In embodiments with at least two NLSs, the NLSs can be the same NLS, or they can be different NLSs.

[0174] In addition, the NLSs can be expressed as part of a RT editor complex. The location of the NLS fusion can be at the N-terminus, the C-terminus, or positioned anywhere within a sequence of a RT editor or a component thereof (e.g., inserted between the DNA endonuclease domain and the DNA polymerase domain of a RT editor fusion protein, between the DNA endonuclease domain and a linker sequence, between a DNA polymerase and a linker sequence, between two linker sequences of a RT editor fusion protein or a component thereof, in either N-terminus to C-terminus or C-terminus to N-terminus order).

[0175] Any NLSs that are known in the art are also contemplated herein. The NLSs may be any naturally occurring NLS, or any non-naturally occurring NLS (e.g., an NLS with one or more mutations relative to a wild-type NLS). In some embodiments, the one or more NLSs of a RT editor comprise bipartite NLSs. In some embodiments, a nuclear localization signal (NLS) is predominantly basic. In some embodiments, the one or more NLSs of a RT editor are rich in lysine and arginine residues. In some embodiments, the one or more NLSs of a RT editor comprise proline residues.

[0176] In some embodiments, a nuclear localization signal (NLS) comprises the sequence of any one of: MDSLLMNRRKFLYQFKNVRWAKGRRETYLC (SEQ ID NO: 66), KRTADGSEFESPKKKRKV (SEQ ID NO: 11), KRTADGSEFEPKKKRKV (SEQ ID NO: 59), NLSKRPAAIKKAGQAKKKK (SEQ ID NO: 60), RQRRNELKRSF (SEQ ID NO: 61), and NQSSNFGPMKGGNFGGRSSGPYGGGGQYFAKPRNQGGY (SEQ ID NO: 62).

[0177] In some embodiments, an NLS is a monopartite NLS. For example, in some embodiments, a NLS is a SV40 large T antigen NLS PKKKRKV (SEQ ID NO: 65). In some embodiments, an NLS is a bipartite NLS. In some embodiments, a bipartite NLS comprises two basic domains separated by a spacer sequence comprising a variable number of amino acids. In some embodiments, an NLS is a bipartite NLS. In some embodiments, a bipartite NLS consists of two basic domains separated by a spacer sequence comprising a variable number of amino acids. In some embodiments, the spacer amino acid sequence comprises the sequence KRXXXXXXXXXXKKKL (Xenopus nucleoplasmin) (SEQ ID NO: 63), wherein X is any amino acid. In some embodiments, the NLS comprises a nucleoplasmin NLS sequence KRPAATKKAGQAKKKK (SEQ ID NO: 64). In some embodiments, an NLS is a noncanonical sequences such as M9 of the hnRNP A1 protein, the influenza virus nucleoprotein NLS, and the yeast Gal4 protein NLS. In some embodiments, a NLS is a noncanonical sequences such as M9 of the hnRNP A1 protein, the influenza virus nucleoprotein NLS, and the yeast Gal4 protein NLS.

[0178] In some embodiments, a bipartite NLS consists of two basic domains separated by a spacer sequence comprising a variable number of amino acids, in some embodiments, an NLS comprises an amino acid sequence that is at least about 50%, 60%, 70%, 80%, 90%, 91%, 92%, 93%, 94%, 95%, 96%, 97%, 98%, 99%, or 100% identical to the amino acid sequence of any one of SEQ ID NOs: 5, 12, and 65-73. In some embodiments, an NLS comprises an amino acid sequence selected from the group consisting of SEQ ID NOs: 5, 12, and 65-73. in some embodiments, a RT editing composition comprises a polynucleotide that encodes an NLS that comprises an amino acid sequence that is at least about 50%, 60%, 70%, 80%, 90%, 91%, 92%, 93%, 94%, 95%, 96%, 97%, 98%, 99%, or 100% identical to the amino acid sequence of any one of SEQ ID NOs: 12, and 65-73. In some embodiments, a RT editing composition comprises a polynucleotide that encodes an NLS that comprises an amino acid sequence selected from the group consisting of SEQ ID NOs: 5, 2, and 65-73.

[0179] Non-limiting examples of NLS sequences are provided in Table 1 below.

TABLE 1
EXEMPLARY NUCLEAR LOCALIZATION SIGNALS

| Name/Description | Sequence | SEQ ID NO: |
|---|---|---|
| NLS of SV40 Large T-AG | PKKKRKV | 65 |
| NLS | MKRTADGSEFESPKKKRKV | 5 |
| NLS | MDSLLMNRRKFLYQFKNVRWAKGRRETYLC | 66 |
| NLS of Nucleoplasmin | AVKRPAATKKAGQAKKKKLD | 67 |
| NLS of EGL-13 | MSRRRKANPTKLSENAKKLAKEVEN | 68 |
| NLS of C-Myc | PAAKRVKLD | 12 |
| NLS of Tus-protein | KLKIKRPVK | 69 |
| NLS of polyoma large T-AG | VSRKRPRP | 70 |
| NLS of Hepatitis D virus antigen | EGAPPAKRAR | 71 |
| NLS of murine p53 | PPQPKKKPLDGE | 72 |
| C-terminal linker and NLS of an | SGGSKRTADGSEFEPKKKRKV | 73 |
| exemplary RT editor fusion | | |
| protein | | |
| Hybrid NLS | PAAKKKKLD | 1054 |
| VirD NLS | PKRPRDRHDGELGGRKRARG | 1055 |

[0180] In some embodiments, components of a RT editor are directly fused to each other. In some embodiments, components of a RT editor are associated to each other via a linker. As used herein, a linker can be any chemical group or a molecule linking two molecules or moieties, e.g., a DNA binding domain, a DNA endonuclease domain and a polymerase domain of a RT editor. In some embodiments, a linker is an organic molecule, group, polymer, or chemical moiety. In some embodiments, the linker comprises a non-peptide moiety. The linker may be a covalent bond (e.g., a carbon-carbon bond, disulfide bond, carbon-heteroatom bond, etc.), or it may be a polymeric linker, for example, a polynucleotide sequence.

[0181] In some embodiments, two or more components of a RT editor are linked to each other by a peptide linker. In some embodiments, a peptide linker is 5-100 amino acids in length, for example, 2, 3, 4, 5, 6, 7, 8, 9, 10, 11, 12, 13, 14, 15, 16, 17, 18, 19, 20, 21, 22, 23, 24, 25, 26, 27, 28, 29, 30, 30-35, 35-40, 40-45, 45-50, 50-60, 60-70, 70-80, 80-90, 90-100, 100-150, or 150-200 amino acids in length. In some embodiments, the peptide linker is 5, 6, 7, 8, 9, 10, 11, 12, 13, 14, 15, 16, 17, 18, 19, 20, 25, 35, 45, 50, 55, 60, 60, 65, 70, 70, 75, 80, 85, 90, 90, 95, 100, 101, 102, 103, 104, 105, 110, 120, 130, 140,150, 160, 175, 180, 190, or 200 amino acids in length. In some embodiments, the peptide linker is 5-100 amino acids in length. In some embodiments, the peptide linker is 10-80 amino acids in length. In some embodiments, the peptide linker is 15-70 amino acids in length. In some embodiments, the peptide linker is 16 amino acids in length, 24 amino acids in length, 64 amino acids in length, or 96 amino acids in length, in some embodiments, the peptide linker is at least 50 amino acids in length, in some embodiments, the peptide linker is at least 40 amino acids in length, in some embodiments, the peptide linker is at least 30 amino acids in length. In some embodiments, the peptide linker is 46 amino acids in length. In some embodiments, the peptide linker is 92 amino acids in length. In some embodiments, the peptide linker is 16 amino acids in length, 24 amino acids in length, 64 amino acids in length, or 96 amino acids in length.

[0182] In some embodiments, the linker comprises the amino acid sequence (GGGGS)n (SEQ ID NO: 74), (G)n, (EAAAK)n (SEQ ID NO: 75), (GGS)n, (SGGS)n (SEQ ID NO: 76), (XP)n, or any combination thereof, wherein n is independently an integer between 1 and 30, and wherein X is any amino acid. In some embodiments, the linker comprises the amino acid sequence (GGS)n, wherein n is 1, 3, or 7. In some embodiments, the linker comprises the amino acid sequence SGSETPGTSESATPES (SEQ ID NO: 77). In some embodiments, the linker comprises the amino acid sequence SGGSSGGSSGSETPGTSESATPESSGGSSGGS (SEQ ID NO: 78). In some embodiments, the linker comprises the amino acid sequence SGGSGGSGGS (SEQ ID NO: 79). In some embodiments, the linker comprises the amino acid sequence SGGS (SEQ ID NO: 10). In some embodiments, the linker comprises the amino acid sequence SGGSSGGSSGSETPGTSESATPESAGSYPYDVPDYAGSAAPAAKKKKLDGSGSGGSSGG S (SEQ ID NO: 80). In some embodiments, the linker comprises the amino acid sequence GGSGGS (SEQ ID NO: 81), GGSGGSGGS (SEQ ID NO: 82), or SGGSSGGSSGSETPGTSESATPESSGGSSGGSS (SEQ ID NO: 83).

[0183] Components of a RT editor may be connected to each other in any order. In some embodiments, the DNA binding domain, a DNA endonuclease domain and the DNA polymerase domain of a RT editor may be fused to form a fusion protein or may be joined by a peptide or protein linker, in any order from the N-terminus to the C-terminus. In some embodiments, a RT editor comprises a DNA binding domain, a DNA endonuclease domain fused or linked to the C-terminal end of a DNA polymerase domain. In some embodiments, a RT editor comprises a DNA binding domain, a DNA endonuclease domain fused or linked to the N-terminal end of a DNA polymerase domain. In some embodiments, the RT editor comprises a fusion protein comprising the structure NH2-[DNA binding domain, a DNA endonuclease domain]-[polymerase]-COOH; or NH2-[polymerase]-[DNA binding domain, a DNA endonuclease domain]-COOH, wherein each instance of “]-[” indicates the presence of an optional linker sequence. In some embodiments, a RT editor comprises a fusion protein and a DNA polymerase domain provided in trans, wherein the fusion protein comprises the structure NH2-[DNA binding domain, a DNA endonuclease domain]-[RNA-protein recruitment polypeptide]-COOH. In some embodiments, a RT editor comprises a fusion protein and a DNA binding domain, a DNA endonuclease domain provided in trans, wherein the fusion protein comprises the structure NH2-[DNA polymerase domain]-[RNA-protein recruitment polypeptide]-COOH.

[0184] In some embodiments, a RT editor fusion protein, a polypeptide component of a RT editor, or a polynucleotide encoding the RT editor fusion protein or polypeptide component, may be split into an N-terminal half and a C-terminal half or polypeptides that encode the N-terminal half and the C-terminal half, and provided to a target DNA in a cell separately. For example, in some embodiments, a RT editor fusion protein may be split into a N-terminal and a C-terminal half for separate delivery in AAV vectors, and subsequently translated and colocalized in a target cell to reform the complete polypeptide or RT editor protein. In such cases, separate halves of a protein or a fusion protein may each comprise a split-intein to facilitate colocalization and reformation of the complete protein or fusion protein by the mechanism of intein facilitated trans splicing. In some embodiments, a RT editor comprises a N-terminal half fused to an intein-N, and a C-terminal half fused to an intein-C, or polynucleotides or vectors (e.g., AAV vectors) encoding each thereof. When delivered and/or expressed in a target cell, the intein-N and the intein-C can be excised via protein trans-splicing, resulting in a complete RT editor fusion protein in the target cell.

tagRNAs

[0185] Disclosed herein include template armed gRNAs (tagRNAs). In some embodiments, the tagRNA comprises: a spacer that is complementary to a search target sequence on a first strand of a target gene; a scaffold sequence, an editing template that comprises a region of complementarity to an editing target sequence on a second strand of the target gene; and a flap binding sequence, wherein the first strand and the second strand are complementary to each other. In some embodiments, the editing target sequence is within the mutation site of the target gene. In some embodiments, the editing target sequence is within exon 14 of the ATP7B gene. In some embodiments, the editing target sequence is within exon 5 of the SERPINA1 gene. In some embodiments, the editing target sequence is within exon 12 of the PAH gene.

[0186] The tagRNA can comprise from 5′ to 3′: the spacer, the scaffold sequence, the editing template, and the FB sequence. In some embodiments, spacer, the scaffold sequence, the editing template, and the FB sequence form a contiguous sequence in a single molecule. The editing template can comprise an intended nucleotide edit compared to the target gene. In some embodiments, the tagRNA guides the RT editor to incorporate the intended nucleotide edit into the target gene when the tagRNA is contacted with the target gene. In some embodiments, the RT editor synthesizes a single stranded DNA encoded by the editing template, wherein the single stranded DNA replaces the editing target sequence and results in incorporation of the intended nucleotide edit into a region corresponding to the editing target in the target gene. The search target sequence can be complementary to a protospacer sequence in the target gene. The protospacer sequence can be adjacent to a protospacer adjacent motif (PAM) in the target gene. In some embodiments, the tagRNA results in incorporation of the intended nucleotide edit in the PAM when contacted with the target gene. In some embodiments, the target gene is the ATP7B gene. In some embodiments, the target gene is the SERPINA1 gene. In some embodiments, the target gene is the ATP7B gene. In some embodiments, the target gene is the PAH gene.

[0187] In some embodiments, the extension arm comprises a flap binding site sequence (FB sequence) that can initiate target-primed DNA synthesis. In some embodiments, the FB sequence is complementary or substantially complementary to a free 3′ end on the edit strand of the target gene at a nick site generated by the RT editor. In some embodiments, the extension arm further comprises an editing template that comprises one or more intended nucleotide edits to be incorporated in the target gene by RT editing. In some embodiments, the editing template is a template for an RNA-dependent DNA polymerase domain or polypeptide of the RT editor, for example, a reverse transcriptase domain. The reverse transcriptase editing template may also be referred to herein as an editing template. In some embodiments, the editing template comprises partial complementarity to an editing target sequence in the target gene, e.g., an ATP7B gene, a PAH gene, or a SERPINA1 gene. In some embodiments, the editing template comprises substantial or partial complementarity to the editing target sequence except at the position of the intended nucleotide edits to be incorporated into the target gene.

[0188] In some embodiments, a tagRNA includes only RNA nucleotides and forms an RNA polynucleotide. In some embodiments, a tagRNA is a chimeric polynucleotide that includes both RNA and DNA nucleotides. For example, a tagRNA can include DNA in the spacer sequence, the scaffold sequence, or the extension arm. In some embodiments, a tagRNA comprises DNA in the spacer sequence. In some embodiments, the entire spacer sequence of a tagRNA is a DNA sequence. In some embodiments, the tagRNA comprises DNA in the scaffold sequence, for example, in a stem region of the scaffold sequence. In some embodiments, the tagRNA comprises DNA in the extension arm, for example, in the editing template. An editing template that comprises a DNA sequence may serve as a DNA synthesis template for a DNA polymerase in a RT editor, for example, a DNA-dependent DNA polymerase. Accordingly, the tagRNA may be a chimeric polynucleotide that comprises RNA in the spacer, scaffold sequence, and/or the FB sequence sequences and DNA in the editing template.

[0189] In some embodiments, a spacer sequence comprises a region that has substantial complementarity to a search target sequence on the target strand of a double stranded target DNA, e.g., an AT7B gene, a PAH gene, or a SERPINA1 gene. In some embodiments, the spacer sequence of a tagRNA is identical or substantially identical to a protospacer sequence on the edit strand of the target gene (except that the protospacer sequence comprises thymine and the spacer sequence may comprise uracil). In some embodiments, the spacer sequence is at least about 70%, 75%, 80%, 85%, 90%, 95%, or 100% complementary to a search target sequence in the target gene. In some embodiments, the spacer comprises is substantially complementary to the search target sequence.

[0190] The spacer of the tagRNA can be from 16 to 25 nucleotides in length. The spacer can be 20 nucleotides in length. The spacer can be 21-23 nucleotides in length. In some embodiments, the length of the spacer varies from about 10 to about 100 nucleotides. In some embodiments, the spacer is 16 nucleotides, 17 nucleotides, 18 nucleotides, 19 nucleotides, 20 nucleotides, 21 nucleotides, 22 nucleotides, 23 nucleotides, 24 nucleotides, or 25 nucleotides in length. In some embodiments, the spacer is from 15 nucleotides to 30 nucleotides in length, 15 to 25 nucleotides in length, 18 to 22 nucleotides in length, 10 to 20 nucleotides in length, or 20 to 30 nucleotides in length. In some embodiments, the spacer is 16 to 22 nucleotides in length. In some embodiments, the spacer is 16 to 20 nucleotides in length. In some embodiments, the spacer is 17 to 18 nucleotides in length.

[0191] As used herein in a gRNA (e.g., a tagRNA or a enhancer guide egRNA sequence), or fragments thereof such as a spacer, FB sequence, or editing template sequence, unless indicated otherwise, it should be appreciated that the letter “T” or “thymine” indicates a nucleobase in a DNA sequence that encodes the tagRNA or guide RNA sequence, and is intended to refer to a uracil (U) nucleobase of the tagRNA or guide RNA or any chemically modified uracil nucleobase known in the art, such as 5-methoxyuracil.

[0192] The extension arm of a tagRNA may comprise a flap binding sequence (FB sequence; FBS) and an editing template (e.g., an ET). The extension arm may be partially complementary to the spacer. In some embodiments, the editing template (e.g., ET) is partially complementary to the spacer. In some embodiments, the editing template (e.g., ET) and the flap binding sequence (FB sequence; FBS) are each partially complementary to the spacer. An extension arm of a tagRNA may comprise a flap binding sequence (FB sequence, or FBS) that comprises complementarity to and can hybridize with a free 3′ end of a single stranded DNA in the target gene (e.g., the ATP7B gene, PAH gene, or SERPINA1 gene) generated by nicking with a RT editor at the nick site on the PAM strand.

[0193] The length of the FB sequence may vary depending on, e.g., the RT editor components, the search target sequence and other components of the tagRNA. The FB sequence can be about 2 to 20 nucleotides in length. The FB sequence can be about 8 to 16 nucleotides in length. In some embodiments, the FB sequence is 6 nucleotides in length In some embodiments, the FB sequence is about 3 to 19 nucleotides in length, or about 3 to 17 nucleotides in length. In some embodiments, the FB sequence is about 4 to 16 nucleotides, about 6 to 16 nucleotides, about 6 to 18 nucleotides, about 6 to 20 nucleotides, about 8 to 20 nucleotides, about 10 to 20 nucleotides, about 12 to 20 nucleotides, about 14 to 20 nucleotides, about 16 to 20 nucleotides, or about 18 to 20 nucleotides in length. In some embodiments, the FB sequence is 8 to 17 nucleotides in length. In some embodiments, the FB sequence is 8 to 16 nucleotides in length. In some embodiments, the FB sequence is 8 to 15 nucleotides in length. In some embodiments, the FB sequence is 8 to 14 nucleotides in length. In some embodiments, the FB sequence is 8 to 13 nucleotides in length. In some embodiments, the FB sequence is 8 to 12 nucleotides in length. In some embodiments, the FB sequence is 8 to 11 nucleotides in length. In some embodiments, the FB sequence is 8 to 10 nucleotides in length. In some embodiments, the FB sequence is 8 or 9 nucleotides in length. In some embodiments, the FB sequence is 16 or 17 nucleotides in length, in some embodiments, the FB sequence is 15 to 17 nucleotides in length. In some embodiments, the FB sequence is 14 to 17 nucleotides in length. In some embodiments, the FB sequence is 13 to 17 nucleotides in length. In some embodiments, the FB sequence is 12 to 17 nucleotides in length. In some embodiments, the FB sequence is 11 to 17 nucleotides in length. In some embodiments, the FB sequence is 10 to 17 nucleotides in length. In some embodiments, the FB sequence is 9 to 17 nucleotides in length. In some embodiments, the FB sequence is about 7 to 15 nucleotides in length. In some embodiments, the FB sequence is 6, 7, 8, 9, 10, 11, 12, 13, 14, 15, 16, 17, 18, or 19 nucleotides in length. In some embodiments, the FB sequence is 8, 9, 10, 11, 12, 13, or 14 nucleotides in length.

[0194] The FB sequence may be complementary or substantially complementary to a DNA sequence in the edit strand of the target gene. By annealing with the edit strand at a free hydroxy group, e.g., a free 3′ end generated by RT editor nicking activity, the FB sequence may initiate synthesis of a new single stranded DNA encoded by the editing template at the nick site. In some embodiments, the FB sequence is at least about 70%, 75%, 80%, 85%, 90%, 95%, or 100% complementary to a region of the edit strand of the target gene (e.g., the ATP7B gene, PAH gene, or SERPINA1 gene). In some embodiments, the FB sequence is perfectly complementary, or 100% complementary, to a region of the edit strand of the target gene (e.g., the ATP7B gene, PAH gene, or SERPINA1 gene).

[0195] In some embodiments, the FB sequence comprises a nucleotide sequence selected from GGCGTGGCAGTCA (SEQ ID NO: 91), GGCGTGGCAGTC (SEQ ID NO: 92), GGCGTGGCAGT (SEQ ID NO: 93), GGCGTGGCAG (SEQ ID NO: 94), GGCGTGGCA, GGCGTGGC, GGCGTGG, and GGCGTG. In some embodiments, the FB sequence comprises a nucleotide sequence having one, two, or three mismatches relative to a sequence selected from GGCGTGGCAGTCA (SEQ ID NO: 91), GGCGTGGCAGTC (SEQ ID NO: 92), GGCGTGGCAGT (SEQ ID NO: 93), GGCGTGGCAG (SEQ ID NO: 94), GGCGTGGCA, GGCGTGGC, GGCGTGG, and GGCGTG. In some embodiments, the FB sequence comprises or consists of a sequence selected from GGCGTGGCAGTCA (SEQ ID NO: 91), GGCGTGGCAGTC (SEQ ID NO: 92), GGCGTGGCAGT (SEQ ID NO: 93), GGCGTGGCAG (SEQ ID NO: 94), GGCGTGGCA, GGCGTGGC, GGCGTGG, and GGCGTG or a sequence at least 85% identical (e.g., 85%, 86%, 87%, 88%, 89%, 90%, 91%, 92%, 93%, 94%, 95%, 96%, 97%, 98%, 99%, 100%, or a number or a range between any two of these values) to a sequence selected from GGCGTGGCAGTCA (SEQ ID NO: 91), GGCGTGGCAGTC (SEQ ID NO: 92), GGCGTGGCAGT (SEQ ID NO: 93), GGCGTGGCAG (SEQ ID NO: 94), GGCGTGGCA, GGCGTGGC, GGCGTGG, and GGCGTG.

[0196] An extension arm of a tagRNA may comprise an editing template that serves as a DNA synthesis template for the DNA polymerase in a RT editor during RT editing. The length of an editing template may vary depending on, e.g., the RT editor components, the search target sequence and other components of the tagRNA. In some embodiments, the editing template serves as a DNA synthesis template for a reverse transcriptase. The editing template can be about 4 to 30 nucleotides in length. The editing template can be about 10 to 30 nucleotides in length. The editing template can be 6 to 9 nucleotides in length. In some embodiments, the editing template is 2, 3, 4, 5, 6, 7, 8, 9, 10, 11, 12, 13, 14, 15, 16, 17, 18, 19, 20, 21, 22, 23, 24, or 25 nucleotides in length.

[0197] In some embodiments, the editing template sequence is about 70%, 75%, 80%, 85%, 90%, 95%, or 99% complementary to the editing target sequence on the edit strand of the target gene. In some embodiments, the editing template sequence is complementary to the editing target sequence except at positions of the intended nucleotide edits to be incorporated int the target gene. In some embodiments, the editing template comprises a nucleotide sequence comprising about 85% to about 95% complementarity to (e.g., 70%, 71%, 72%, 73%, 74%, 75%, 76%, 77%, 78%, 79%, 80%, 81%, 82%, 83%, 84%, 85%, 86%, 87%, 88%, 89%, 90%, 91%, 92%, 93%, 94%, 95%, 96%, 97%, 98%, 99%, 100%, or a number or a range between any two of these values, complementarity to) an editing target sequence in the edit strand in the target gene. In some embodiments, the editing template comprises about 86%, about 87%, about 88%, about 89%, about 90%, about 91%, about 92%, about 93%, about 94%, about 95%, about 96%, about 97%, about 98%, or about 99% complementarity to an editing target sequence in the edit strand of the target gene (e.g., the ATP7B gene, PAH gene, or SERPINA1 gene).

[0198] In some embodiments, the editing template comprises a nucleotide sequence selected from SEQ ID NOs: 95-98. In some embodiments, the editing template comprises a nucleotide sequence selected from SEQ ID NOs: 95-98 or a sequence having one, two, or three mismatches relative to a nucleotide sequence selected from SEQ ID NOs: 95-98. In some embodiments, the editing template comprises or consists of a nucleotide sequence selected from SEQ ID NOs: 95-98 or a sequence at least 85% identical (e.g., 85%, 86%, 87%, 88%, 89%, 90%, 91%, 92%, 93%, 94%, 95%, 96%, 97%, 98%, 99%, 100%, or a number or a range between any two of these values) to a nucleotide sequence selected from SEQ ID NOs: 95-98.

[0199] An intended nucleotide edit or intended nucleotide edits in an editing template of a tagRNA may comprise various types of alterations as compared to the target gene sequence, in some embodiments, the nucleotide edit or edits is nucleotide substitution(s) as compared to the target gene sequence. In some embodiments, the nucleotide edit comprise deletion(s) as compared to the target gene sequence. In some embodiments, the nucleotide edit comprise an insertion as compared to the target gene sequence. In some embodiments, the editing template comprises one to ten intended nucleotide edits as compared to the target gene sequence, in some embodiments, the editing template comprises one or more intended nucleotide edits as compared to the target gene sequence. In some embodiments, the editing template comprises two or more intended nucleotide edits as compared to the target gene sequence. In some embodiments, the editing template comprises three or more intended nucleotide edits as compared to the target gene sequence. In some embodiments, the editing template comprises four or more, five or more, or six or more intended nucleotide edits as compared to the target gene sequence. In some embodiments, the editing template comprises two or more single nucleotide substitutions, insertions, deletions, or any combination thereof, as compared to the target gene sequence. In some embodiments, the editing template comprises three single nucleotide substitutions, insertions, deletions, or any combination thereof as compared to the target gene sequence. In some embodiments, the editing template comprises four, five, or six single nucleotide substitutions, insertions, deletions, or any combination thereof, as compared to the target gene sequence. In some embodiments, a nucleotide substitution comprises an adenine (A)-to-thymine (T) substitution. In some embodiments, a nucleotide substitution comprises an A-to-guanine (G) substitution. In some embodiments, a nucleotide substitution comprises an A-to-cytosine (C) substitution. In some embodiments, a nucleotide substitution comprises a T-A substitution. In some embodiments, a nucleotide substitution comprises a T-G substitution, in some embodiments, a nucleotide substitution comprises a T-C substitution. In some embodiments, a nucleotide substitution comprises a G-to-A substitution. In some embodiments, a nucleotide substitution comprises a G-to-T substitution. In some embodiments, a nucleotide substitution comprises a G-to-C substitution. In some embodiments, a nucleotide substitution comprises a C-to-A substitution, in some embodiments, a nucleotide substitution comprises a C-to-T substitution. In some embodiments, a nucleotide substitution comprises a C-to-G substitution.

[0200] In some embodiments, a nucleotide insertion is at least 5 nucleotides, at least 6 nucleotides, at least 7 nucleotides, at least 8 nucleotides, at least 9 nucleotides, at least 10 nucleotides, at least 11 nucleotides, at least 12 nucleotides, at least 13 nucleotides, at least 14 nucleotides, at least 15 nucleotides, at least 16 nucleotides, at least 17 nucleotides, at least 18 nucleotides, at least 19 nucleotides, at least 20 nucleotides, at least 22 nucleotides, at least 24 nucleotides, at least 26 nucleotides, at least 28 nucleotides, at least 30 nucleotides, at least 32 nucleotides, at least 34 nucleotides, at least 36 nucleotides, at least 38 nucleotides, at least 40 nucleotides, at least 42 nucleotides, at least 44 nucleotides, at least 46 nucleotides, at least 48 nucleotides, or at least 50 nucleotides, in length. In some embodiments, a nucleotide insertion is from 1 to 2 nucleotides, from 1 to 3 nucleotides, from 1 to 4 nucleotides, from 1 to 5 nucleotides, form 2 to 5 nucleotides, from 3 to 5 nucleotides, from 3 to 6 nucleotides, from 3 to 8 nucleotides, from 4 to 9 nucleotides, from 5 to 10 nucleotides, from 6 to 11 nucleotides, from 7 to 12 nucleotides, from 8 to 13 nucleotides, from 9 to 14 nucleotides, from 10 to 15 nucleotides, from 11 to 16 nucleotides, from 12 to 17 nucleotides, from 13 to 18 nucleotides, from 14 to 19 nucleotides, from 15 to 20 nucleotides in length. In some embodiments, a nucleotide insertion is a single nucleotide insertion. In some embodiments, a nucleotide insertion comprises insertion of two nucleotides.

[0201] The editing template of a tagRNA may comprise one or more intended nucleotide edits, compared to the target gene to be edited. Position of the intended nucleotide edit(s) relevant to other components of the tagRNA, or to particular nucleotides (e.g., mutations) in the target gene may vary. In some embodiments, the nucleotide edit is in a region of the tagRNA corresponding to or homologous to the protospacer sequence. In some embodiments, the nucleotide edit is in a region of the tagRNA corresponding to a region of the target gene outside of the protospacer sequence.

[0202] In some embodiments, the position of a nucleotide edit incorporation in the target gene may be determined based on position of the protospacer adjacent motif (PAM). For instance, the intended nucleotide edit may be installed in a sequence corresponding to the protospacer adjacent motif (PAM) sequence. In some embodiments, a nucleotide edit in the editing template is at a position corresponding to the 5′ most nucleotide of the PAM sequence. In some embodiments, a nucleotide edit in the editing template is at a position corresponding to the 3′ most nucleotide of the PAM sequence, in some embodiments, position of an intended nucleotide edit in the editing template may be referred to by aligning the editing template with the partially complementary edit strand of the target gene, and referring to nucleotide positions on the editing strand where the intended nucleotide edit is incorporated, in some embodiments, a nucleotide edit is incorporated at a position corresponding to about 0, 1, 2, 3, 4, 5, 6, 7, 8, 9, 10, 11, 12, 13, 14, 15, 16, 17, 18, 19, 20, 21, 22, 23, 24, 25, 26, 27, 28, 29, 30, 31, 32, 33, 34, 35, 36, 37, 38, 39, or 40 nucleotides upstream of the 5′ most nucleotide of the PAM sequence in the edit strand of the target gene. By 0 base pair upstream or downstream of a reference position, it is meant that the intended nucleotide is immediately upstream or downstream of the reference position. In some embodiments, a nucleotide edit is incorporated at a position corresponding to about 0 to 2 nucleotides, 0 to 4 nucleotides, 0 to 6 nucleotides, 0 to 8 nucleotides, 0 to 10 nucleotides, 2 to 4 nucleotides, 2 to 6 nucleotides, 2 to 8 nucleotides, 2 to 10 nucleotides, 2 to 12 nucleotides, 4 to 6 nucleotides, 4 to 8 nucleotides, 4 to 10 nucleotides, 4 to 12 nucleotides, 4 to 14 nucleotides, 6 to 8 nucleotides, 6 to 10 nucleotides, 6 to 12 nucleotides, 6 to 14 nucleotides, 6 to 16 nucleotides, 8 to 10 nucleotides, 8 to 12 nucleotides, 8 to 14 nucleotides, 8 to 16 nucleotides, 8 to 18 nucleotides, 10 to 12 nucleotides, 10 to 14 nucleotides, 10 to 16 nucleotides, 10 to 18 nucleotides, 10 to 20 nucleotides, 12 to 14 nucleotides, 12 to 16 nucleotides, 12 to 18 nucleotides, 12 to 20 nucleotides, 12 to 22 nucleotides, 14 to 16 nucleotides, 14 to 18 nucleotides, 14 to 20 nucleotides, 14 to 22 nucleotides, 14 to 24 nucleotides, 16 to 18 nucleotides, 16 to 20 nucleotides, 16 to 22 nucleotides, 16 to 24 nucleotides, 16 to 26 nucleotides, 18 to 20 nucleotides, 18 to 22 nucleotides, 18 to 24 nucleotides, 18 to 26 nucleotides, 18 to 28 nucleotides, 20 to 22 nucleotides, 20 to 24 nucleotides, 20 to 26 nucleotides, 20 to 28 nucleotides, or 20 to 30 nucleotides upstream of the 5′ most nucleotide of the PAM sequence. In some embodiments, the nucleotide edit is incorporated at a position corresponding to 3 nucleotides upstream of the 5′ most nucleotide of the PAM sequence. In some embodiments, the nucleotide edit in is incorporated at a position corresponding to 4 nucleotides upstream of the 5′ most nucleotide of the PAM sequence. In some embodiments, the nucleotide edit is incorporated at a position corresponding to 5 nucleotides upstream of the 5′ most nucleotide of the PAM sequence. In some embodiments, the nucleotide edit in the editing template is at a position corresponding to 6 nucleotides upstream of the 5′ most nucleotide of the PAM sequence.

[0203] In some embodiments, an intended nucleotide edit is incorporated at a position corresponding to about 0, 1, 2, 3, 4, 5, 6, 7, 8, 9, 10, 11, 12, 13, 14, 15, 16, 17, 18, 19, 20, 21, 22, 23, 24, 25, 26, 27, 28, 29, 30, 31, 32, 33, 34, 35, 36, 37, 38, 39, or 40 nucleotides downstream of the 5′ most nucleotide of the PAM sequence in the edit strand of the target gene. In some embodiments, a nucleotide edit is incorporated at a position corresponding to about 0 to 2 nucleotides, 0 to 4 nucleotides, 0 to 6 nucleotides, 0 to 8 nucleotides, 0 to 10 nucleotides, 2 to 4 nucleotides, 2 to 6 nucleotides, 2 to 8 nucleotides, 2 to 10 nucleotides, 2 to 12 nucleotides, 4 to 6 nucleotides, 4 to 8 nucleotides, 4 to 10 nucleotides, 4 to 12 nucleotides, 4 to 14 nucleotides, 6 to 8 nucleotides, 6 to 10 nucleotides, 6 to 12 nucleotides, 6 to 14 nucleotides, 6 to 16 nucleotides, 8 to 10 nucleotides, 8 to 12 nucleotides, 8 to 14 nucleotides, 8 to 16 nucleotides, 8 to 18 nucleotides, 10 to 12 nucleotides, 10 to 14 nucleotides, 10 to 16 nucleotides, 10 to 18 nucleotides, 10 to 20 nucleotides, 12 to 14 nucleotides, 12 to 16 nucleotides, 12 to 18 nucleotides, 12 to 20 nucleotides, 12 to 22 nucleotides, 14 to 16 nucleotides, 14 to 18 nucleotides, 14 to 20 nucleotides, 14 to 22 nucleotides, 14 to 24 nucleotides, 16 to 18 nucleotides, 16 to 20 nucleotides, 16 to 22 nucleotides, 16 to 24 nucleotides, 16 to 26 nucleotides, 18 to 20 nucleotides, 18 to 22 nucleotides, 18 to 24 nucleotides, 18 to 26 nucleotides, 18 to 28 nucleotides, 20 to 22 nucleotides, 20 to 24 nucleotides, 20 to 26 nucleotides, 20 to 28 nucleotides, or 20 to 30 nucleotides downstream of the 5′ most nucleotide of the PAM sequence. In some embodiments, a nucleotide edit is incorporated at a position corresponding to 3 nucleotides downstream of the 5′ most nucleotide of the PAM sequence. In some embodiments, a nucleotide edit is incorporated at a position corresponding to 4 nucleotides downstream of the 5′ most nucleotide of the PAM sequence. In some embodiments, a nucleotide edit is incorporated at a position corresponding to 5 nucleotides downstream of the 5′ most nucleotide of the PAM sequence. In some embodiments, a nucleotide edit is incorporated at a position corresponding to 6 nucleotides downstream of the 5′ most nucleotide of the PAM sequence.

[0204] In some embodiments, the position of a nucleotide edit incorporation in the target gene can be determined based on position of the nick site. In some embodiments, position of an intended nucleotide edit is 0, 1, 2, 3, 4, 5, 6, 7, 8, 9, 10, 11, 12, 13, 14, 15, 16, 17, 18, 19, 20, 21, 22, 23, 24, 25, 26, 27, 28, 29, 30, 31, 32, 33, 34, 35, 36, 37, 38, 39, 40, 45, 50, 55, 60, 65, 70, 75, 80, 85, 90, 95, 100, 110, 120, 130, 140, or 150 nucleotides apart from the nick site. In some embodiments, position of an intended nucleotide edit is 0, 1, 2, 3, 4, 5, 6, 7, 8, 9, 10, 11, 12, 13, 14, 15, 16, 17, 18, 19, 20, 21, 22, 23, 24, 25, 26, 27, 28, 29, 30, 31, 32, 33, 34, 35, 36, 37, 38, 39, 40, 45, 50, 55, 60, 65, 70, 75, 80, 85, 90, 95, 100, 110, 120, 130, 140, or 150 nucleotides downstream of the nick site on the PAM strand (or the non-target strand, or the edit strand) of the double stranded target DNA. In some embodiments, position of the intended nucleotide edit in the editing template can be referred to by aligning the editing template with the partially complementary editing target sequence on the edit strand and referring to nucleotide positions on the editing strand where the intended nucleotide edit is incorporated. Accordingly, in some embodiments, a nucleotide edit in an editing template is at a position corresponding to a position about 0, 1, 2, 3, 4, 5, 6, 7, 8, 9, 10, 11, 12, 13, 14, 15, 16, 17, 18, 19, 20, 21, 22, 23, 24, 25, 26, 27, 28, 29, 30, 31, 32, 33, 34, 35, 36, 37, 38, 39, 40, 45, 50, 55, 60, 65, 70, 75, 80, 85, 90, 95, 100, 110, 120, 130, 140, or 150 nucleotides apart from the nick site. In some embodiments, a nucleotide edit in an editing template is at a position corresponding to a position about 0 to 2 nucleotides, 0 to 4 nucleotides, 0 to 6 nucleotides, 0 to 8 nucleotides, 0 to 10 nucleotides, 2 to 4 nucleotides, 2 to 6 nucleotides, 2 to 8 nucleotides, 2 to 10 nucleotides, 2 to 12 nucleotides, 4 to 6 nucleotides, 4 to 8 nucleotides, 4 to 10 nucleotides, 4 to 12 nucleotides, 4 to 14 nucleotides, 6 to 8 nucleotides, 6 to 10 nucleotides, 6 to 12 nucleotides, 6 to 14 nucleotides, 6 tol6 nucleotides, 8 to 10 nucleotides, 8 to 12 nucleotides, 8 to 14 nucleotides, 8 to 16 nucleotides, 8 to 18 nucleotides, 10 to 12 nucleotides, 10 to 14 nucleotides, 10 to 16 nucleotides, 10 to 18 nucleotides, 10 to 20 nucleotides, 12 to 14 nucleotides, 12 to 16 nucleotides, 12 to 18 nucleotides, 12 to 20 nucleotides, 12 to 22 nucleotides, 14 to 16 nucleotides, 14 to 18 nucleotides, 14 to 20 nucleotides, 14 to 22 nucleotides, 14 to 24 nucleotides, 16 to 18 nucleotides, 16 to 20 nucleotides, 16 to 22 nucleotides, 16 to 24 nucleotides, 16 to 26 nucleotides, 18 to 20 nucleotides, 18 to 22 nucleotides, 18 to 24 nucleotides, 18 to 26 nucleotides, 18 to 28 nucleotides, 20 to 22 nucleotides, 20 to 24 nucleotides, 20 to 26 nucleotides, 20 to 28 nucleotides, 20 to 30 nucleotides, 30 to 40 nucleotides, 40 to 50 nucleotides, 50 to 60 nucleotides, 60 to 70 nucleotides, 70 to 80 nucleotides, 80 to 90 nucleotides, 90 to 100 nucleotides, 100 to 110 nucleotides, 110 to 120 nucleotides, 120 to 130 nucleotides, 130 to 140 nucleotides, or 140 to 150 nucleotides apart from the nick site. In some embodiments, when referred to in the context of the PAM strand (or the non-target strand, or the edit strand), a nucleotide edit in an editing template is at a position corresponding to a position about 0 to 2 nucleotides, 0 to 4 nucleotides, 0 to 6 nucleotides, 0 to 8 nucleotides, 0 to 10 nucleotides, 2 to 4 nucleotides, 2 to 6 nucleotides, 2 to 8 nucleotides, 2 to 10 nucleotides, 2 to 12 nucleotides, 4 to 6 nucleotides, 4 to 8 nucleotides, 4 to 10 nucleotides, 4 to 12 nucleotides, 4 to 14 nucleotides, 6 to 8 nucleotides, 6 to 10 nucleotides, 6 to 12 nucleotides, 6 to 14 nucleotides, 6 tol6 nucleotides, 8 to 10 nucleotides, 8 to 12 nucleotides, 8 to 14 nucleotides, 8 to 16 nucleotides, 8 to 18 nucleotides, 10 to 12 nucleotides, 10 to 14 nucleotides, 10 to 16 nucleotides, 10 to 18 nucleotides, 10 to 20 nucleotides, 12 to 14 nucleotides, 12 to 16 nucleotides, 12 to 18 nucleotides, 12 to 20 nucleotides, 12 to 22 nucleotides, 14 to 16 nucleotides, 14 to 18 nucleotides, 14 to 20 nucleotides, 14 to 22 nucleotides, 14 to 24 nucleotides, 16 to 18 nucleotides, 16 to 20 nucleotides, 16 to 22 nucleotides, 16 to 24 nucleotides, 16 to 26 nucleotides, 18 to 20 nucleotides, 18 to 22 nucleotides, 18 to 24 nucleotides, 18 to 26 nucleotides, 18 to 28 nucleotides, 20 to 22 nucleotides, 20 to 24 nucleotides, 20 to 26 nucleotides, 20 to 28 nucleotides, 20 to 30 nucleotides, 30 to 40 nucleotides, 40 to 50 nucleotides, 50 to 60 nucleotides, 60 to 70 nucleotides, 70 to 80 nucleotides, 80 to 90 nucleotides, 90 to 100 nucleotides, 100 to 110 nucleotides, 110 to 120 nucleotides, 120 to 130 nucleotides, 130 to 140 nucleotides, or 140 to 150 nucleotides downstream from the nick site. The relative positions of the intended nucleotide edit(s) and nick site may be referred to by numbers. For example, in some embodiments, the nucleotide immediately downstream of the nick site on a PAM strand (or the non-target strand, or the edit strand) may be referred to as at position 0. The nucleotide immediately upstream of the nick site on the PAM strand (or the non-target strand, or the edit strand) may be referred to as at position −1. The nucleotides downstream of position 0 on the PAM strand can be referred to as at positions +1, +2, +3, +4, . . . +n, and the nucleotides upstream of position −1 on the PAM strand may be referred to as at positions −2, −3, −4, . . . −n. Accordingly, in some embodiments, the nucleotide in the editing template that corresponds to position 0 when the editing template is aligned with the partially complementary editing target sequence by complementarity can also be referred to as position 0 in the editing template, the nucleotides in the editing template corresponding to the nucleotides at positions +1, +2, +3, +4, . . . , +n on the PAM strand of the double stranded target DNA can also be referred to as at positions +1, +2, +3, +4, . . . , −in in the editing template, and the nucleotides in the editing template corresponding to the nucleotides at positions −1, −2, −3, −4, . . . , −n on the PAM strand on the double stranded target DNA may also be referred to as at positions −1, −2, −3, −4 −n on the editing template, even though when the tagRNA is viewed as a standalone nucleic acid, positions +1, +2, +3, +4, . . . , +n are 5′ of position 0 and positions −1, −2, −3, −4, . . . −n are 3′ of position 0 in the editing template. In some embodiments, an intended nucleotide edit is at position +n of the editing template relative to position 0. Accordingly, the intended nucleotide edit may be incorporated at position +n of the PAM strand of the double stranded target DNA (and subsequently, the target strand of the double stranded target DNA) by RT editing. The number n may be referred to as the nick to edit distance.

[0205] When referred to within the tagRNA, positions of the one or more intended nucleotide edits may be referred to relevant to components of the tagRNA. For example, an intended nucleotide edit may be 5′ or 3′ to the FB sequence. In some embodiments, a tagRNA comprises the structure, from 5′ to 3′: a spacer, a gRNA core, an editing template, and a FB sequence. In some embodiments, the intended nucleotide edit is 0, 1, 2, 3, 4, 5, 6, 7, 8, 9, 10, 11, 12, 13, 14, 15, 16, 17, 18, 19, 20, 21, 22, 23, 24, 25, 26, 27, 28, 29, 30, 31, 32, 33, 34, 35, 36, 37, 38, 39, or 40 nucleotides upstream to the 5′ most nucleotide of the FB sequence. in some embodiments, the intended nucleotide edit is 0 to 2 nucleotides, 0 to 4 nucleotides, 0 to 6 nucleotides, 0 to 8 nucleotides, 0 to 10 nucleotides, 2 to 4 nucleotides, 2 to 6 nucleotides, 2 to 8 nucleotides, 2 to 10 nucleotides, 2 to 12 nucleotides, 4 to 6 nucleotides, 4 to 8 nucleotides, 4 to 10 nucleotides, 4 to 12 nucleotides, 4 to 14 nucleotides, 6 to 8 nucleotides, 6 to 10 nucleotides, 6 to 12 nucleotides, 6 to 14 nucleotides, 6 to 16 nucleotides, 8 to 10 nucleotides, 8 to 12 nucleotides, 8 to 14 nucleotides, 8 to 16 nucleotides, 8 to 18 nucleotides, 10 to 12 nucleotides, 10 to 14 nucleotides, 10 to 16 nucleotides, 10 to 18 nucleotides, 10 to 20 nucleotides, 12 to 14 nucleotides, 12 to 16 nucleotides, 12 to 18 nucleotides, 12 to 20 nucleotides, 12 to 22 nucleotides, 14 to 16 nucleotides, 14 to 18 nucleotides, 14 to 20 nucleotides, 14 to 22 nucleotides, 14 to 24 nucleotides, 16 to 18 nucleotides, 16 to 20 nucleotides, 16 to 22 nucleotides, 16 to 24 nucleotides, 16 to 26 nucleotides, 18 to 20 nucleotides, 18 to 22 nucleotides, 18 to 24 nucleotides, 18 to 26 nucleotides, 18 to 28 nucleotides, 20 to 22 nucleotides, 20 to 24 nucleotides, 20 to 26 nucleotides, 20 to 28 nucleotides, or 20 to 30 nucleotides upstream to the 5′ most nucleotide of the FB sequence.

[0206] The corresponding positions of the intended nucleotide edit incorporated in the target gene may also be referred to based on the nicking position (i.e., the nick site) generated by a RT editor based on sequence homology and complementarity. For example, in some embodiments, the distance between the intended nucleotide edit to be incorporated into the target gene and the nick site (also referred to as the “nick to edit distance”) may be determined by the position of the nick site and the position of the nucleotide(s) corresponding to the intended nucleotide edit(s), for example, by identifying sequence complementarity between the spacer and the search target sequence and sequence complementarity between the editing template and the editing target sequence. In some embodiments, the position of the nucleotide edit can be in any position downstream of the nick site on the edit strand (or the PAM strand) generated by the RT editor, such that the distance between the nick site and the intended nucleotide edit is 0, 1, 2, 3, 4, 5, 6, 7, 8, 9, 10, 11, 12, 13, 14, 15, 16, 17, 18, 19, 20, 21, 22, 23, 24, 25, 26, 27, 28, 29, or 30 nucleotides in length. In some embodiments, the position of the nucleotide edit is 0, 1, 2, 3, 4, 5, 6, 7, 8, 9, 10, 11, 12, 13, 14, 15, 16, 17, 18, 19, 20, 21, 22, 23, 24, 25, 26, 27, 28, 29, or 30 nucleotides upstream of the nick site on the edit strand. In some embodiments, the position of the nucleotide edit is 0, 1, 2, 3, 4, 5, 6, 7, 8, 9, 10, 11, 12, 13, 14, 15, 16, 17, 18, 19, 20, 21, 22, 23, 24, 25, 26, 27, 28, 29, or 30 nucleotides downstream of the nick site on the edit strand. In some embodiments, the position of the nucleotide edit is 0 base pair from the nick site on the edit strand, that is, the editing position is at the same position as the nick site. As used herein, the distance between the nick site and the nucleotide edit, for example, where the nucleotide edit comprises an insertion or deletion, refers to the 5′ most position of the nucleotide edit for a nick that creates a 3′ free end on the edit strand (i.e., the “near position” of the nucleotide edit to the nick site). Similarly, as used herein, the distance between the nick site and a PAM position edit, for example, where the nucleotide edit comprises an insertion, deletion, or substitution of two or more contiguous nucleotides, refers to the 5′ most position of the nucleotide edit and the 5′ most position of the PAM sequence.

[0207] In some embodiments, the editing template extends beyond a nucleotide edit to be incorporated into the target gene sequence. For example, in some embodiments, the editing template comprises at least 1, 2, 3, 4, 5, 6, 7, 8, 9, 10, 11, 12, 13, 14, 15, 16, 17, 18, 19, 20, 21, 22, 23, 24, 25, 26, 27, 28, 29, 30, 31, 32, 33, 34, 35, 36, 37, 38, 39, 40, 41, 42, 43, 44, 45, 46, 47, 48, 49, 50, 51, 52, 53, 54, 55, 56, 57, 58, 59, 60, 61, 62, 63, 64, 65, 66, 67, 68, 69, 70, 71, 72, 73, 74, 75, 76, 77, 78, 79, or 80 nucleotides 3′ to the nucleotide edit to be incorporated into the target gene sequence. In some embodiments, the editing template comprises 1 to 80 nucleotides 3′ to the nucleotide edit to be incorporated into the target gene sequence.

[0208] In some embodiments, the editing template can comprise a second editing sequence comprising a second mutation relative to a target sequence. The second mutation can be designed to mutate or otherwise silence a PAM sequence such that a corresponding nucleic acid guided nuclease or CRISPR nuclease is no longer able to cleave the target sequence. In some embodiments, this mutation or silencing of a PAM can serve as a method for selecting transformants in which the first editing sequence has been incorporated. In some embodiments, the mutation is in at least 1, 2, 3, 4, 5, 6, 7, 8, 9, 10 or more nucleic acids in a PAM motif.

[0209] The editing template of a tagRNA may encode a new single stranded DNA (e.g., by reverse transcription) to replace a editing target sequence in the target gene. In some embodiments, the editing target sequence in the edit strand of the target gene is replaced by the newly synthesized strand, and the nucleotide edit(s) are incorporated into the region of the target gene.

[0210] In some embodiments, the target gene is ATP7B gene. In some embodiments, the editing template of the tagRNA encodes a newly synthesized single stranded DNA that comprises a wild type ATP7B gene sequence. In some embodiments, the newly synthesized DNA strand replaces the editing target sequence in the target ATP7B gene, wherein the editing target sequence (or the endogenous sequence complementary to the editing target sequence on the target strand of the ATP7B gene) comprises a mutation compared to a wild-type ATP7B gene. In some embodiments, the mutation is associated with Wilson's disease.

[0211] In some embodiments, the target gene is SERPINA1 gene. In some embodiments, the editing template of the tagRNA encodes a newly synthesized single stranded DNA that comprises a wild type SERPINA1 gene sequence. In some embodiments, the newly synthesized DNA strand replaces the editing target sequence in the target SERPINA1 gene, wherein the editing target sequence (or the endogenous sequence complementary to the editing target sequence on the target strand of the SERPINA1 gene) comprises a mutation compared to a wild-type SERPINA1 gene. In some embodiments, the mutation is associated with A1ATD disease or disorder.

[0212] In some embodiments, the target gene is the PAH gene. In some embodiments, the editing template of the tagRNA encodes a newly synthesized single stranded DNA that comprises a wild type PAH gene sequence. In some embodiments, the newly synthesized DNA strand replaces the editing target sequence in the target PAH gene, wherein the editing target sequence (or the endogenous sequence complementary to the editing target sequence on the target strand of the PAH gene) comprises a mutation compared to a wild-type PAH gene. In some embodiments, the mutation is associated with phenylketonuria or hyperphenylalaninemia.

[0213] In some embodiments, the editing target sequence comprises a mutation in exon 1, exon 2, exon 3, exon 4, exon 5, exon 6, exon 7, exon 8, exon 9, exon 10, exon 11, exon 12, exon 13, exon 14, exon 15, exon 16, exon 17, exon 18, exon 19, exon 20, or exon 21 of the target gene as compared to a wild type target gene, in some embodiments, the editing target sequence comprises a mutation in exon 8, exon 13, exon 14, exon 15, or exon 17 of the ATP7B gene as compared to a wild type ATP7B gene. In some embodiments, the editing target sequence comprises a mutation in exon 14 of the ATP7B gene as compared to a wild type ATP7B gene. In some embodiments, the editing target sequence comprises a mutation that encodes an amino acid substitution H1069Q relative to a wild type ATP7B polypeptide. In some embodiments, the ATP7B gene sequence comprises a C>A (e.g., C-A, C to A) mutation. In some embodiments, the mutation is the S allele mutation or the Z allele mutation in SERPINA1 gene associated with alpha-1 antitrypsin deficiency disease (A1ATD). In some embodiments, the mutation is the Z allele mutation on exon 5 of SERPINA1. In some embodiment, the mutation is an E342K mutation commonly associated with A1ATD. E342K mutation leads to misfolding of the alpha-1-antitrypsin (AAT) protein leading to polymers and liver damage. In some embodiments, the mutation is the R408W mutation in PAH gene associated with phenylketonuria or hyperphenylalaninemia.

[0214] The compositions and methods described herein can be used to correct a disease-causing mutation or otherwise edit the PAH gene at any position. Exemplary mutations in PAH that can be edited with the disclosed compositions and methods include, but are not limited To: p.M1L; p.M1V; p.M1R; p.M1T; p.M1I; p.V5Sfs*3; p.N8Ifs*30; p.G10G; p.R13Qfs*5; p.L11*; p.L15Qfs*24; p.S16P; p.D17Lfs*22; p.S16*; p.S16Y; p.D17*; p.Q20Kfs*17; p.Q20*; p.Q20L; p.Q20P; p.Q20Pfs*7; p.Q20H; p.T22K; p.E26Lfs*13; p.I25Mfs*13; p.N28=; p.C29*; p.I35M; p.S36*; p.L37P; p.I38Dfs*19; p.F39del; p.F39L; p.S40L; p.L41F; p.L41P; p.K42del; p.K42E; p.K42I; p.E43*; p.E44del; p.V45A; p.G46R; p.G46S; p.G46Vfs*15; p.A47E; p.A47V; p.L48=; p.L48V; p.L48S; p.L48W; pA49T; p.V51L; p.L52Cfs*9; p.L52S; p.L52F; p.R53C; p.R53H; p.L54S; p.F55del; p.F55S; p.F55L; p.F55Lfs*6; p.E56=; p.E56D; p.E57Rfs*3; p.E57*; p.E57Cfs*77; p.E57del; p.E57K; p.N58*; p.N58*; p.D59Y; p.D59G; p.D59V; p.N61D; p.N61S; p.N61K; p.L62*; p.L62Pfs*7; p.L62V; p.H64Dfs*4; p.L62P; p.L62Pfs*3; p.T63_H64delinsPN; p.T63P; p.H64Pfs*10; p.H64*; p.H64N; p.H64Tfs*9; p.I65V; p.I65Kfs*9; p.I65N; p.I65S; p.I65T; p.I65M; p.E66*; p.E66K; p.E66Afs*8; p.S67A; p.S67P; p.R68G; p.R68S; p.P69_S70dup; p.P69S; p.P69T; p.S70del; p.S70Ffs*7; p.S70del; p.S70P; p.S70F; p.R71C; p.R71H; p.R71P; p.D75N; p.N75H; p.D75G; p.D75V; p.E76*; p.E76K; p.E76A; p.E76G; p.E76D; p.Y77H; p.Y77*; p.E78K; p.E78Q; p.E78V; p.E78Ffs*13; p.F79Ifs*7; p.T81P; p.T81Vfs*6; p.T81N; p.L83Wfs*9; p.D84Y; p.D84G; p.K85*; p.R86P; p.S87R; p.P89S; p.P89T; p.A90Cfs*12; p.T92I; p.Q93Sfs*5; p.N93Kfs*5; p.I95F; p.I95del; p.I95T; p.I95I; p.I97L; p.L98V; p.L98S; p.H100R; p.D101N; p.I102T; p.G103C; p.G103S; p.G103D; p.A104_V106del; p.A104S; p.A104D; p.A104V; p.V106A; p.H107P; p.H107R; p.E108*; p.E108Dfs*4; p.S110L; p.R111*; p.R111Q; p.D112H; p.D112Efs*2; p.K113_K114fs*81; p.K115Rfs*81; p.K115Tfs*79; p.D116Hfs*29; p.T117I; p.T117Kfs*78; p.P119S; p.P119L; p.W120Gfs*75; p.W120*; p.F121L; p.F121V; p.F121S; p.P122S; p.P122Q; p.R123I; p.T124I; p.E127K; p.E127G; p.L128P; p.D129Y; p.D129G; p.D129V; p.A132V; p.N133Rfs*61; p.Q134*; p.S137S; p.L142P; p.D143G; p.D143V; p.D145N; p.D145V; p.H146Y; p.P147S; p.P147L; p.P147=; p.G148Lfs*105; p.G148R; p.G148S; p.G148Wfs*29; p.G148D; p.G148V; p.F149S; p.D151RfsTer13; p.D151H; p.D151G; p.D151E; p.P152Lfs*43; p.P152T; p.R155Lfs*43; p.Y154H; p.Y154N; p.Y154C; p.Y154F; p.Y154*; p.R155C; p.R155Vfs*40; p.R155H; p.R155P; p.A156P; p.R157I; p.R157K; p.R157N; p.R157T; p.R157S; p.R158G; p.R158W; p.R158P; p.R158Q; p.K159*; p.Q160*; p.Q160P; p.F161S; p.D163N; p.I164V; p.I164T; p.A165P; p.A165T; p.A165Vfs*35; p.A165D; p.Y166*; p.N167Y; p.N167I; p.N167S; p.Y168H; p.Y168N; p.Y168Sfs*27; p.Y168*; p.R169C; p.R169G; p.R169S; p.R169H; p.R169Pfs*26; p.H170D; p.H170P; p.H170R; p.H170Q; p.G171R; p.G171W; p.G171A; p.G171E; p.Q172*; p.Q172R; p.Q172H; p.P173T; p.I174V; p.I174N; p.I174T; p.P175A; p.P175S; p.P175R; p.R176*; p.R176L; p.R176P; p.R176Q; p.V177L; p.V177M; p.V177A; p.E178K; p.E178G; p.E178V; p.Y179H; p.Y179N; p.M180V; p.M180Ifs*18; p.E181Kfs*13; p.E183del; p.E182K; p.E182G; p.E183L; p.E183Q; p.E183G; p.K184Rfs*11; p.K184N; p.T186Hfs*9; p.T186I; p.W187Gfs*12; p.W187Gfs*8; p.W187R; p.W187*; p.W187C; p.G188Afs*7; p.G188D; p.G188V; p.V190M; p.V190A; p.V190G; p.K192*; p. T193P; p.T193I; p.L194Dfs*6; p.L194Efs*5; p.L194P; p.L194R; p.S196Vfs*4; p.S196Lfs*2; p.S196T; p.S196Y; p.L197*; p.L197W; p.Y198Sfs*136; p.L197F; p.Y198Vfs*9; p.Y198D; p.Y198Sfs*136; p.Y198*; p.T200Nfs*6; p.T200N; p.H201Y; p.H201P; p.H201R; p.H201Q; p.A202T; p.A202V; p.C203G; p.C203Lfs*3; p.C203S; p.C203Y; p.C203*; p.C203C; p.C203W; p.Y204*; p.Y204Y; p.E205K; p.E205A; p.E205D; p.Y206D; p.Y206C; p.Y206*; p.N207D; p.N207S; p.P211T; p.P211Hfs*130; p.P211L; p.L212P; p.E214Kfs*127; p.L213P; p.E214G; p.Y216*; p.C217G; p.C217R; p.C217F; p.C217Y; p.G218Afs*123; p.G218V; p.F219S; p.H220P; p.E221G; p.D222*; p.D222G; p.D222V; p.N223Y; p.Q226Tfs*118; p.N223I; p.N223Kfs*118; p.I224T; p.I224M; p.P225A; p.P225T; p.P225L; p.P225R; p.Q226*; p.Q226K; p.Q226H; p.L227M; p.L227V; p.L227Q; p.E228*; p.E228K; p.E228G; p.E228D; p.D229Efs*54; p.D229G; p.V230I; p.V230A; p.V230G; p.S231Vfs*52; p.S231P; p.S231F; p.Q232*; p.Q232E; p.Q232P; p.Q232R; p.Q232Q; p.F233I; p.F233L; p.Q235*; p.Q235P; p.T236Mfs*60; p.C237F; p.T238A; p.T238P; p.G239S; p.G239A; p.G239D; p.G239V; p.F240V; p.F240S; p.F240=; p.R241C; p.R241H; p.R241L; p.R241P; p.R241Pfs*100; p.L242F; p.L242=; p.R243*; p.R243L; p.R243Q; p.P244S; p.P244L; p.V245I; p.V245L; p.V245M; p.V245A; p.V245E; p.V245V; p.A246D; p.A246V; p.A246Vfs*95; p.G247R; p.G247S; p.G247Afs*94; p.G247D; p.G247V; p.L248P; p.L248R; p.L248Rfs*93; p.L249F; p.L249Ffs*92; p.L249H; p.L249P; p.S250F; p.R252Gfs*30; p.R252Gfs*89; p.R252G; p.R252W; p.R252L; p.R252P; p.R252Q; p.F254I; p.L255=; p.L255V; p.L255S; p.L255W; p.G257C; p.G257S; p.G257D; p.G257V; p.L258=; p.L258P; p.L258R; p.A259T; p.A259V; p.F260I; p.F260L; p.R261*; p.R261G; p.R261L; p.R261P; p.R261Q; p.V262G; p.F263S; p.F263L; p.H264L; p.C265G; p.C265R; p.C265Y; p.C265*; p.T266A; p.T266E; p.T266P; p.T266I; p.Q267*; p.Q267E; p.Q267L; p.Q267R; p.Q267H; p.Y268H; p.Y268C; p.Y268*; p.I269L; p.I269N; p.I269Tfs*72; p.R270G; p.R270I; p.R270K; p.H271Ifs*10; p.R270S; p.H271Y; p.H271L; p.H271R; p.H271Q; p.G272*; p.S273P; p.S273F; p.K274E; p.K274Nfs*5; p.P275A; p.P275S; p.P275L; p.P275R; p.P275=; p.M276V; p.M276K; p.M276R; p.M276T; p.M276I; p.Y277D; p.Y277C; p.T278A; p.E280Nfs*61; p. T278I; p.T278N; p.T278S; p.P279T; p.P279L; p.E280Nfs*61; p.P279P; p.E280_IVS7+3fs; p.E280*; p.E280K; p.E280Q; p.E280A; p.E280Dfs*3; p.E280G; p.P281A; p.P281fs; p.P281S; p.P281L; p.P281R; p.D282N; p.D282G; p.I283F; p.I283V; p.I283N; p.C284R; p.C284Y; p.C284*; p.H285Y; p.E286K; p.E286=; p.L287V; p.L288F; p.G289R; p.G289R; p.H290Y; p.H290L; p.H290R; p.H290Q; p.V291L; p.V291M; p.P292S; p.P292H; p.P292L; p.292=; p.L293M; p.L293S; p. S295*; p.D296H; p.D296G; p.R297C; p.R297H; p.R297L; p.F299del; p.F299C; p.F299S; p.A300S; p.A300D; p.A300V; p.Q301*; p.Q301P; p.Q301H; p.F302fs*39; p.F302V; p.S303A; p.S303P; p.S303Pfs*38; p.Q304*; p.Q304K; p.Q304P; p.Q304R; p.Q304Q; p.I306Lfs*35; p.I306V; p.G307Afs*34; p.G307D; p.L308F; p.L308V; p.A309T; p.A309D; p.A309V; p.S310_L311del; p.S310P; p.L311*; p.S310C; p.S310F; p.S310Y; p.L311*; p.L311Gfs*4; p.L311P; p.L311R; p.G312C; p.G312R; p.G312S; p.G312D; p.G312V; p.G312Vfs*29; p.A313T; p.A313V; p.P314A; p.P314S; p.P314T; p.P314H; p.P314Lfs*27; p.D315Y; p.Y317H; p.I318T; p.K320N; p.L321F; p.L321L; p.A322T; p.A322D; p.A322G; p.A322V; p.T323del; p.T323I; p.T323T; p.I324V; p.I324N; p.Y325C; p.Y325S; p.Y325*; p.W326Gfs*15; p.W326*; p.W326S; p.F327L; p.T328A; p.T328P; p.T328I; p.T328N; p.E330D; p.F331L; p.F331C; p.F331S; p.G332R; p.G332E; p.G332V; p.L333F; p.L333P; p.C334R; p.C334S; p.C334*; p.K335E; p.K335T; p.Q336*; p.Q336R; p.G337V; p.D338Y; p.S339F; p.S339Y; p.I340T; p.K341*; p.K341R; p.K341T; p.A342Hfs*59; p.K341K; p.K341N; p.A342Hfs*58; p.A342P; p.A342S; p.A342T; p.A342E; p.Y343D; p.Y343N; p.Y343C; p.Y343F; p.Y343*; p.G344R; p.G344S; p.G344D; p.G344V; p.A345S; p.A345T; p.G346R; p.G346E; p.L347Sfs*53; p.L347F; p.L347=; p.L348Cfs*52; p.L348V; p.L348P; p.L348Rfs*2; p.S350Vfs*5; p.S349A; p.S349P; p.S349*; p.S349L; p.S350T; p.S350Y; p.G352C; p.G352Cfs*48; p.G352R; p.G352Vfs*48; p.E353Nfs*47; p.E353*; p.E353Vfs*42; p.L354Ffs*40; p.Q355*; p.Y356D; p.Y356H; p.Y356*; p.C357G; p.C357R; p.C357Y; p.C357*; p.L358V; p.L358F; p.S359*; p.S359L; p.E360*; p.K361Q; p.P362S; p.P362T; p.P362L; p.K363Afs*30; p.K363N; p.K363Nfs*37; p.L364F; p.L365_L369del; p.L365del; p.P366A; p.P366H; p.L367Pfs*27; p.L367V; p.L367Wfs*33; p.L367P; p.L367R; p.L367L; p.E368K; p.E368G; p.L369V; p.E370Afs*25; p.L369L; p.E370G; p.E370D; p.K371R; p.T372S; p.T372R; p.A373Hfs*20; p.A373T; p.A373D; p.A373=; p.I374Yfs*20; p.Q375E; p.Q375R; p.Q375H; p.N376Ifs*24; p.N376T; p.Y377D; p.Y377Tfs*23; p.Y377C; p.T378S; p.V379A; p.T380Gfs*13; p.T380M; p.F382I; p.F382L; p.F382L; p.Q383*; p.Q383E; p.P384S; p.L385P; p.L385=; p.Y386D; p.Y386H; p.Y386C; p.Y386Ffs*14; p.Y387D; p.Y387H; p.Y387*; p.Y387=; p.V388Gfs*5; p.V388L; p.V388M; p.V388A; p.V388Gfs*5; p.A389E; p.A389Efs*11; p.A389G; p.E390_S391delin; sGG; p.E390Dfs*4; p.E390G; p.S391Ffs*2; p.S391G; p.S391I; p.S391T; p.F392I; p.F392S; p.N393Ifs*2; p.D394H; p.D394Y; p.D394A; p.A395P; p.A395S; p.A395D; p.A395G; p.K396R; p.K398E; p.K398K; p.K398N; p.V399A; p.V399Gfs*52; p.V399V; p.R400Gfs*52; p.R400R; p.R400K; p.R400T; p.N401_S439del; p.N401Tfs*51; p.R400S; p.F402I; p.F402L; p.F402V; p.F402C; p.A403V; p.I406Sfs*17; p.I406Sfs*15; p.I406V; p.I406T; p.I406M; p.P407S; p.P407T; p.P407L; p.P407Lfs*45; p.R408Gfs*44; p.R408W; p.R408L; p.R408Q; p.P409S; p.P409L; p.F410I; p.F410L; p.F410C; p.F410S; p.S411*; p.V412D; p.V412G; p.R413C; p.R413G; p.R413S; p.R413H; p.R413P; p.Y414H; p.Y414C; p.Y414*; p.Y414Y; p.D415N; p.D415Y; p.D415A; p.D415V; p.P416Hfs*36; p.P416T; p.P416Q; p.Y417D; p.Y417H; p.Y417N; p.Y417C; p.Y417*; p.T418P; p.T418N; p.Q419P; p.Q419R; p.R420M; p.I421S; p.I421T; p.E422K; p.L424Wfs*28; p.L424*; p.L424S; p.N426N; p.Q428Sfs*24; p.Q429K; p.Q429P; p.L430P; p.L430R; p.L433Ffs*3; p.A434D; p.A434V; p.D435N; p.D435V; p.S436Pfs*16; p.N438D; p.N438fs; p.G442Wfs*47; p.L444F; p.L444P; p.A447P; p.A447D; p.L448Rfs*3; p.*453Vext*35; p.*453Pext*33; 1378G>T; 1503A>G; 1546G>A; 4171_-405del; −4173_-407del; −626G>A; −480delACT; −224G>A; −147C>T; −81C>T; −71A>C; −52G>C; −1C>T; c.60+4A>T; c.60+5_60+6del; c.60+5G>A; c.60+5G>C; c.60+5G>T; c.60+40T>G; c.60+62C>T; c.61-13del9; c.61-3T>C; c.168+1G>A; c.168+1G>T; c.168+2T>C; c.168+5G>A; c.168+5G>C; c.168+5G>T; c.168+6T>G; c.168+19T>C; c.169-13T>G; c.169-2A>G; c.169-1G>A; c.352+1G>A; c.352+7757C>G; c.353-22C>A; c.353-22C>T; c.353-6T>A; c.353-2A>G; c.353-2A>T; c.353-1G>A; c.353-1G>C; c.353-1G>T; c.441+1delGT; c.441+1G>A; c.441+1G>C; c.441+1G>T; c.441+2T>C; c.441+2_441+3del; c.441+2T>A; c.441+2T>G; c.441+3G>C; c.441+4A>G; c.441+5G>A; c.441+5G>T; c.441+6T>A; c.441+6T>C; c.441+47C>T; c.442-14C>T; c.442-5C>G; c.442-2A>C; c.442-1G>A; c.509+1delG; c.509+1G>A; c.509+5delG; c.509+54C>G; c.509+101A>C; c.510-21_665del177; c.510-54G>A; c.510-6T>A; c.510-6T>G; c.510-2A>G; c.510-1G>A; c.706+1G>T; c.706+4A>T; c.706+5G>A; c.706+17G>T; c.706+36T>G; c.706+44T>G; c.707-96A>G; c.707-59C>G; c.707-7A>T; c.707-2A>G; c.707-1G>A; c.707-1G>C; c.842+1G>A; c.842+1G>T; c.842+2T>A; c.842+3G>C; c.842+4A>G; c.842+4A>T; c.842+5G>A; c.842+6T>A; c.842+25G>T; c.843-14_11del; c.843-6T>C; c.843-5T>C; c.843-4del; c.843-2A>T; c.912+1G>A; c.912+1G>C; c.912+1G>T; c.912+2T>C; c.912+3A>C; c.912+16T>A; c.913-8A>G; c.913-7A>G; c.913-5T>C; c.913-5T>G; c.913-3C>G; c.913-2A>G; c.969+1G>A; c.969+2insT; c.969+4A>T; c.969+5G>A; c.969+5G>C; c.969+6T>A; c.969+6T>C; c.969+34G>A; c.969+43G>T; c.970-7A>G; c.970-6T>G; c.970-5T>A; c.970-3C>T; c.970-2A>C; c.970-2A>G; c.970-1G>A; c.970-1G>C; c.970-1G>T; c.1065+1G>A; c.1065+1G>T; c.1065+3A>C; c.1065+3A>G; c.1065+7C>A; c.1065+32T>A; c.1065+39G>T; c.1065+97G>A; c.1066-193G>C; c.1066-31G>A; c.1066-15A>C; c.1066-14C>G; c.1066-13del; c.1066-13T>G; c.1066-12del; c.1066-11G>A; c.1066-10G>A; c.1066-7C>A; c.1066-3C>G; c.1066-3C>T; c.1066-2A>G; c.1066-2A>T; c.1066-1G>A; c.1066-1G>C; c.1066-1G>T; c.1199+1G>A; c.1199+1G>C; c.1199+1G>T; c.1199+2T>C; c.1199+2T>G; c.1199+4A>G; c.1199+5G>A; c.1199+5G>A; c.1199+17G>A; c.1199+19T>C; c.1199+20G>C; c.1199+50G>A; c.1199+88del; c.1200-35C>T; c.1200-12del; c.1200-8G>A; c.1200-3T>G; c.1200-2A>G; c.1200-2A>C; c.1200-1del; c.1200-1G>A; c.1200-1G>C; c.1200-1G>T; c.1315+1G>A; c.1315+1G>T; c.1315+2T>C; c.1315+4A>G; c.1315+5G>A; c.1315+5G>C; c.1315+5G>T; c.1315+6T>A; c.1316-35C>T; c.1316-16T>G; c.1316-15T>C; c.1316-5T>C; c.1316-2A>C; and c.1316-1G>A. Mutations in the PAH gene are also described in Chen, Ting, et al. (“Mutational and phenotypic spectrum of phenylalanine hydroxylase deficiency in Zhejiang Province, China.” Scientific Reports 8.1 (2018): 17137) and Hillert, Alicia, et al. (“The genetic landscape and epidemiology of phenylketonuria.” The American Journal of Human Genetics 107.2 (2020): 234-250), the contents of which are hereby incorporated by reference in their entireties.

[0215] In some embodiments, the tagRNA results in incorporation of the intended nucleotide edit about 0 to 27 base pairs downstream (e.g., 0, 1, 2, 3, 4, 5, 6, 7, 8, 9, 10, 11, 12, 13, 14, 15, 16, 17, 18, 19, 20, 21, 22, 23, 24, 25, 26, 27 base pairs downstream) of the 5′ end of the PAM when contacted with the target gene. The intended nucleotide edit can comprise a single nucleotide substitution compared to the region corresponding to the editing target in the target gene. The single nucleotide substitution can be a T>G substitution. The intended nucleotide edit can comprise an insertion compared to the region corresponding to the editing target in the target gene. The intended nucleotide edit can comprise a deletion compared to the region corresponding to the editing target in the target gene. The editing target sequence can comprise a mutation associated with a disease or disorder. In some embodiments, the mutation encodes an amino acid substitution. In some embodiments, the amino acid substitution is H1069Q. The editing template can comprise a wild-type ATP7B gene sequence. In some embodiments, the tagRNA results in correction of the mutation when contacted with the ATP7B gene. In some embodiments, the mutation is the S allele mutation or the Z allele mutation in SERPINA1 gene associated with alpha-1 antitrypsin deficiency disease (A1ATD). The Z allele mutation on exon 5 of SERPINA1 is an E342K mutation commonly associated with A1ATD. E342K mutation leads to misfolding of the alpha-1-antitrypsin (AAT) protein leading to polymers and liver damage. The editing template can comprise a wild-type SERPINA1 gene sequence. In some embodiments, the tagRNA results in correction of the mutation when contacted with the SERPINA1 gene.

[0216] In some embodiments, the tagRNA comprises a nucleotide sequence selected from SEQ ID NOs: 16-47, 99-130, 164-181, 320-497, 563-682, 791-792, 1046-1053, and 1089-1203. In some embodiments, the tagRNA comprises a nucleotide sequence selected from SEQ ID NOs: 16-47, 99-130, 164-181, 320-497, 563-682, 791-792, 1046-1053, and 1089-1203 or a sequence have one, two, or three mismatches relative to a nucleotide sequence selected from SEQ ID NOs: 16-47, 99-130, 164-181, 320-497, 563-682, 791-792, 1046-1053, and 1089-1203. In some embodiments, the tagRNA comprises or consists of a nucleotide sequence selected from SEQ ID NOs: 16-47, 99-130, 164-181, 320-497, 563-682, 791-792, 1046-1053, and 1089-1203 or a sequence at least 85% identical to a nucleotide sequence selected from SEQ ID NOs: 16-47, 99-130, 164-181, 320-497, 563-682, 791-792, 1046-1053, and 1089-1203 (e.g., 85%, 86%, 87%, 88%, 89%, 90%, 91%, 92%, 93%, 94%, 95%, 96%, 97%, 98%, 99%, 100%, or a number or a range between any two of these values, identical to a nucleotide sequence selected from SEQ ID NOs: 16-47, 99-130, 164-181, 320-497, 563-682, 791-792, 1046-1053, and 1089-1203).

[0217] A scaffold sequence (also referred to herein as the gRNA core, gRNA scaffold, or gRNA backbone sequence) of a tagRNA may contain a polynucleotide sequence that binds to a DNA binding domain, a DNA endonuclease domain (e.g., Cas9) of a RT editor. The scaffold sequence may interact with a RT editor as described herein, for example, by association with a DNA binding domain, a DNA endonuclease domain, such as a DNA nickase of the RT editor.

[0218] One of skill in the art will recognize that different RT editors having different DNA binding domain and a DNA endonuclease domains from different DNA binding domain and a DNA endonuclease proteins may require different gRNA core sequences specific to the DNA binding domain and a DNA endonuclease protein. In some embodiments, the scaffold sequence is capable of binding to a Cas9-based RT editor. In some embodiments, the scaffold sequence is capable of binding to a Cpf1-based RT editor. In some embodiments, the scaffold sequence is capable of binding to a Cas12b-based RT editor. In some embodiments, the scaffold sequence is capable of binding to a Cas9 nickase of any one of the sequences selected from SEQ ID NOs: 6, 142-163 and 270-314.

[0219] In some embodiments, the scaffold sequence comprises regions and secondary structures involved in binding with specific CRISPR Cas proteins. For example, in a Cas9 based RT editing system, the scaffold sequence of a tagRNA may comprise one or more regions of a base paired “lower stem” adjacent to the spacer sequence and a base paired “upper stem” following the lower stem, where the lower stem and upper stem may be connected by a “bulge” comprising unpaired RNAs. The scaffold sequence may further comprise a “nexus” distal from the spacer sequence, followed by a hairpin structure, e.g., at the 3′ end. In some embodiments, the scaffold sequence comprises modified nucleotides as compared to a wild type gRNA core in the lower stem, upper stem, and/or the hairpin. For example, nucleotides in the lower stem, upper stem, an/or the hairpin regions may be modified, deleted, or replaced. In some embodiments, RNA nucleotides in the lower stem, upper stem, and/or the hairpin regions may be replaced with one or more DNA sequences. In some embodiments, the scaffold sequence comprises unmodified or wild type RNA sequences in the nexus and/or the bulge regions. In some embodiments, the scaffold sequence does not include long stretches of A-T pairs, for example, a GUUUU-AAAAC (SEQ ID NO: 889) pairing element.

[0220] A tagRNA may also comprise optional modifiers, e.g., 3′ end modifier region and/or an 5′ end modifier region. In some embodiments, a tagRNA comprises at least one nucleotide that is not part of a spacer, a scaffold sequence, or an extension arm. The optional sequence modifiers can be positioned within or between any of the other regions of the tagRNA, and not limited to being located at the 3′ and 5′ ends. In some embodiments, the tagRNA comprises secondary RNA structure, such as, but not limited to, aptamers, hairpins, stem/loops, toeloops, and/or RNA-binding protein recruitment domains (e.g., the MS2 aptamer which recruits and binds to the MS2cp protein). In some embodiments, a tagRNA comprises a short stretch of uracil at the 5′ end or the 3′ end. For example, in some embodiments, a tagRNA comprising a 3′ extension arm comprises a “UUU” sequence at the 3′ end of the extension arm. In some embodiments, a tagRNA comprises a toeloop sequence at the 3′ end. In some embodiments, the tagRNA comprises a 3′ extension arm and a toeloop sequence at the 3′ end of the extension arm. In some embodiments, the tagRNA comprises a 5′ extension arm and a toeloop sequence at the 5′ end of the extension arm. In some embodiments, the tagRNA comprises a toeloop element having the sequence S′-GAAANNNNN-3′, wherein N is any nucleobase. In some embodiments, the secondary RNA structure is positioned within the spacer. In some embodiments, the secondary structure is positioned within the extension arm. In some embodiments, the secondary structure is positioned within the gRNA core. In some embodiments, the secondary structure is positioned between the spacer and the gRNA core, between the gRNA core and the extension arm, or between the spacer and the extension arm. In some embodiments, the secondary structure is positioned between the FB sequence and the editing template. In some embodiments the secondary structure is positioned at the 3′ end or at the 5′ end of the tagRNA. In some embodiments, the tagRNA comprises a transcriptional lamination signal at the 3′ end of the tagRNA. In addition to secondary RNA structures, the tagRNA may comprise a chemical linker or a poly(N) linker or tail, where “N” can be any nucleobase. In some embodiments, the chemical linker may function to prevent reverse transcription of the gRNA core.

[0221] The tagRNAs may be modified in one or more ways to improve their overall stability and/or performance in RT editing. The tagRNA can comprise 3′ mN*mN*mN*N and 5′ mN*mN*mN* modifications, where m indicates that the nucleotide contains a 2′-O-Me modification and a * indicates the presence of a phosphorothioate bond. The tagRNA can comprise a structural motif at the 3′ terminus selected from the group consisting of: an inverted-dT, a prequeosine1-1 riboswitch aptamer (evopreQ1) and variants thereof, a frameshifting pseudoknot from Moloney murine leukemia virus (MMLV) (mpknot), G-quadruplexes, hairpin structures, xrRNA, and a P4-P6 domain of the group I intron. In some embodiments, the structural motif is evopreQ1 or a variant thereof comprising a nucleotide sequence selected from SEQ ID NOs: 84-90. In some embodiments, the structural motif is evopreQ1 or a variant thereof comprising a nucleotide sequence selected from SEQ ID NOs: 84-90 or a sequence having one, two or three mismatches relative a sequence selected from SEQ ID NOs: 84-90. In some embodiments, the structural motif is evopreQ1 or a variant thereof comprising a nucleotide sequence selected from SEQ ID NOs: 84-90 or a sequence at least 85% identical (85%, 86%, 87%, 88%, 89%, 90%, 91%, 92%, 93%, 94%, 95%, 96%, 97%, 98%, 99%, 100%, or a number or a range between any two of these values) to a nucleotide sequence selected from SEQ ID NOs: 84-90. In some embodiments, the evopreQ1 is trimmed (TevopreQ1).

[0222] In some embodiments, appending one or more RNA structural motifs to a tagRNA can protect against degradation of the tagRNA. Such RNA structural motifs can include, but are not limited to (i) a prequeosine1-1 riboswitch aptamer (evopreQ1) and variants thereof, (ii) a frameshifting pseudoknot from Moloney murine leukemia virus (MMLV), hereafter referred to as “mpknot,” and variants thereof (iii) G-quadruplexes, (iv) hairpin structures (e.g., 15-bp hairpins), (v) xrRNA, and (vi) a P4-P6 domain of the group I intron.

[0223] The present disclosure provides modified tagRNAs with improved properties, including but not limited to, increased stability and cellular lifespan, and improved binding affinity for a RT editor. These modified tagRNAs result in improved genome editing as demonstrated by increase editing efficiency at a wide variety of genomic sites. In some embodiments, by appending certain nucleic acid structural motifs to terminus of the extension arm of a tagRNA, including but limited to, a prequeosin₁-1 riboswitch aptamer (“evopreQ₁-1”) or variant thereof, a pseudoknot from the MMLV viral genome (“evopreQ₁-1”) or variant thereof, a modified tRNA used by MMLV RT as a primer for reverse transcription or variant thereof, and a G quadruplex or variant thereof, a consistent increase in editing activity can be achieved. In some embodiments, the 3′ terminus of the tagRNA comprises a evopreQ1 aptamer or variant thereof, comprising or consisting of a sequence of any one of: TTGACGCGGTTCTATCTAGTTACGCGTTAAACCAACTAGAAA (SEQ ID NO: 84), CGCGAGTCTAGGGGATAACGCGTTAAACTTCCTAGAAGGCGGTT (SEQ ID NO: 85), CGCGGATCTAGATTGTAACGCGTTAAACCATCTAGAAGGCGGTT (SEQ ID NO: 86), CGCGTCGCTACCGCCCGGCGCGTTAAACACACTAGAAGGCGGTT (SEQ ID NO: 87), CGCGGTTCTATCTAGTTACGCGTTAAACCAACTAGAA (SEQ ID NO: 88), TTGACGCGCTTCTATCTAGTTACGCGTTAAACCAACTAGAAA (SEQ ID NO: 89), and TTGACGCGGTTCTATCTACTTACGCGTTAAACCAACTAGAAA (SEQ ID NO: 90). For RNA sequences, T can be U.

[0224] In one embodiment, the modified tagRNAs include a nucleic acid moiety at the 3′ end of the tagRNA. Optionally, the 3′ end of the tagRNA is fused to the nucleic acid moiety through a nucleotide linker. In various embodiments, it will be appreciated that a wide variety of nucleotide sequences will work reasonably well for each genomic target site. Linker length can also be variable. In some cases, linkers ranging in length from 3-18 nucleotides can be used. In other cases, the linker may be at least 3 nucleotides, at least 4 nucleotides, at least 5 nucleotides, at least 6 nucleotides, at least 7 nucleotides, at least 8 nucleotides, at least 9 nucleotides, at least 10 nucleotides, at least 11 nucleotides, at least 12 nucleotides, at least 13 nucleotides, at least 14 nucleotides, at least 15 nucleotides, at least 16 nucleotides, at least 17 nucleotides, at least 18 nucleotides, at least 19 nucleotides, at least 20 nucleotides, at least 21 nucleotides, at least 22 nucleotides, at least 23 nucleotides, at least 24 nucleotides, at least 25 nucleotides, at least 26 nucleotides, at least 27 nucleotides, at least 28 nucleotides, at least 29 nucleotides, or at least 30 nucleotides.

[0225] In general, the nucleic acid moieties that may be used to modify a tagRNA, for example, by attaching it to the 3′ end of a tagRNA, may include any nucleic acid moiety, including, for instance, a nucleic acid molecule comprising or which forms a double-helix moiety, toeloop moiety, hairpin moiety, stem-loop moiety, pseudoknot moiety, aptamer moiety, G quadraplex moiety, tRNA moiety, or a ribozyme moiety. The nucleic acid moiety may be characterized as forming a secondary nucleic acid structure, a tertiary nucleic acid structure, or a quadruple nucleic acid structure. In other words, the nucleic acid moiety may form any two dimensional or three dimensional structure known to be formed by such structures. The nucleic acid moiety may be DNA or RNA.

[0226] In some embodiments, a tagRNA or a nick guide RNA (egRNA) can be chemically synthesized, or can be assembled or cloned and transcribed from a DNA sequence, e.g., a plasmid DNA sequence, or by any RNA oligonucleotide synthesis method known in the art. In some embodiments, DNA sequence that encodes a tagRNA (or egRNA) can be designed to append one or more nucleotides at the 5′ end or the 3′ end of the tagRNA (or nick guide RNA) encoding sequence to enhance tagRNA transcription. For example, in some embodiments, a DNA sequence that encodes a tagRNA (or an egRNA) can be designed to append a nucleotide G at the 5′ end. Accordingly, in some embodiments, the tagRNA (or nick guide RNA) can comprise an appended nucleotide G at the 5′ end. In some embodiments, a DNA sequence that encodes a tagRNA (or nick guide RNA) can be designed to append a sequence that enhances transcription, e.g., a Kozak sequence, at the 5′ end. In some embodiments, a DNA sequence that encodes a tagRNA (or nick guide RNA) can be designed to append the sequence CACC or CCACC at the 5′ end. Accordingly, in some embodiments, the tagRNA (or nick guide RNA) can comprise an appended sequence CACC or CCACC at the 5′ end. In some embodiments, a DNA sequence that encodes a tagRNA (or nick guide RNA) can be designed to append the sequence TTT, TTTT, TTTTT, TTTTTT, TTTTTTT at the 3′ end. Accordingly, in some embodiments, the tagRNA (or nick guide RNA) can comprise an appended sequence UUU, UUIUU, UUUUU, UUU UUU, or UUTJUUUUU at the 3′ end.

[0227] Disclosed herein include RT editing systems. In some embodiments, the RT editing system comprises: any of the tagRNAs disclosed herein, or a nucleic acid encoding the tagRNA; and a RT editor comprising a DNA binding domain, a DNA endonuclease domain and a DNA polymerase domain, or a nucleic acid encoding the RT editor. In some embodiments, the intended nucleotide edit incorporation rate of the RT editing system is greater than at least about 30%, about 40%, about 50%, about 60%, about 70%, or about 80% (e.g., about 30%, 31%, 32%, 33%, 34%, 35%, 36%, 37%, 38%, 39%, 40%, 41%, 42%, 43%, 44%, 45%, 46%, 47%, 48%, 49%, 50%, 51%, 52%, 53%, 54%, 55%, 56%, 57%, 58%, 59%, 60%, 61%, 62%, 63%, 64%, 65%, 66%, 67%, 68%, 69%, 70%, 71%, 72%, 73%, 74%, 75%, 76%, 77%, 78%, 79%, 80%, 81%, 82%, 83%, 84%, 85%, 86%, 87%, 88%, 89%, 90%, 91%, 92%, 93%, 94%, 95%, 96%, 97%, 98%, 99%, 100%, or a number or a range between any two of these values).

[0228] Disclosed herein include RT editing complexes. In some embodiments, the RT editing complex comprises: (i) any of the tagRNA disclosed herein and a RT editor comprising a DNA endonuclease domain and a DNA polymerase domain; or (ii) any of the RT editing systems of the disclosure. In some embodiments, the intended nucleotide edit incorporation rate of the RT editing complex is greater than at least about 30%, about 40%, about 50%, about 60%, about 70%, or about 80% (e.g., about 30%, 31%, 32%, 33%, 34%, 35%, 36%, 37%, 38%, 39%, 40%, 41%, 42%, 43%, 44%, 45%, 46%, 47%, 48%, 49%, 50%, 51%, 52%, 53%, 54%, 55%, 56%, 57%, 58%, 59%, 60%, 61%, 62%, 63%, 64%, 65%, 66%, 67%, 68%, 69%, 70%, 71%, 72%, 73%, 74%, 75%, 76%, 77%, 78%, 79%, 80%, 81%, 82%, 83%, 84%, 85%, 86%, 87%, 88%, 89%, 90%, 91%, 92%, 93%, 94%, 95%, 96%, 97%, 98%, 99%, 100%, or a number or a range between any two of these values).

Enhancer gRNA (egRNA)

[0229] Disclosed herein include RT editing systems. In some embodiments, the RT editing system comprises: any of the tagRNAs disclosed herein, or a nucleic acid encoding the tagRNA; and a RT editor comprising a DNA binding domain, a DNA endonuclease domain and a DNA polymerase domain, or a nucleic acid encoding the RT editor. The RT editing system can comprise: an enhancer guide RNA (egRNA), or a nucleic acid encoding the egRNA, wherein the egRNA comprises a egRNA spacer that is complementary to a second search target sequence in the target gene.

[0230] In some embodiments, a RT editing system or composition further comprises an enhancer guide polynucleotide, such as an enhancer guide RNA (egRNA). Without wishing to be bound by any particular theory, the non-edit strand of a double stranded target DNA in the target gene may be nicked by a CRISPR-Cas nickase directed by an egRNA. In some embodiments, the nick on the non-edit strand directs endogenous DNA repair machinery to use the edit strand as a template for repair of the non-edit strand, which may increase efficiency of RT editing. In some embodiments, the non-edit strand is nicked by a RT editor localized to the non-edit strand by the egRNA. Accordingly, also provided herein are tagRNA systems comprising at least one tagRNA and at least one egRNA.

[0231] In some embodiments, the egRNA is a guide RNA which contains a variable spacer sequence and a guide RNA scaffold or core region that interacts with the DNA binding domain, a DNA endonuclease domain, e.g., Cas9 of the RT editor, in some embodiments, the egRNA comprises a spacer sequence (referred to herein as an ng spacer, or a second spacer) that is substantially complementary to a second search target sequence (or ng search target sequence), which is located on the edit strand, or the non-target strand. Thus, in some embodiments, the egRNA search target sequence recognized by the egRNA spacer and the search target sequence recognized by the spacer sequence of the tagRNA are on opposite strands of the double stranded target DNA of target gene, e.g., the ATP7B gene, PAH gene, or SERPINA1 gene. In some embodiments, an egRNA spacer sequence is complementary to, and may hybridize with the second search target sequence only after an intended nucleotide edit has been incorporated on the edit strand, by the editing template of a tagRNA.

[0232] In some embodiments, the egRNA search target sequence is located on the non-target strand, within 10 base pairs to 100 base pairs of an intended nucleotide edit incorporated by the tagRNA on the edit strand, in some embodiments, the egRNA target search target sequence is within 10 bp, 20 bp, 30 bp, 40 bp, 50 bp, 60 bp, 70 bp, 80 bp, 90 bp, 91 bp, 92 bp, 93 bp, 94 bp, 95 bp, 96 bp, 97 bp, 98 bp, 99 bp, or 100 bp of an intended nucleotide edit incorporated by the tagRNA on the edit strand. In some embodiments, the 5′ ends of the egRNA search target sequence and the tagRNA search target sequence are within 1, 2, 3, 4, 5, 6, 7, 8, 9, or 10 bp apart from each other. In some embodiments, the 5′ ends of the egRNA search target sequence and the tagRNA search target sequence are within 10 bp, 20 bp, 30 bp, 40 bp, 50 bp, 60 bp, 70 bp, 80 bp, 90 bp, 91 bp, 92 bp, 93 bp, 94 bp, 95 bp, 96 bp, 97 bp, 98 bp, 99 bp, or 100 bp apart from each other.

[0233] In some embodiments, an egRNA spacer sequence is complementary to, and may hybridize with the second search target sequence only after an intended nucleotide edit has been incorporated on the edit strand, by the editing template of a tagRNA. In some embodiments, the egRNA comprises a spacer sequence that matches only the edit strand after incorporation of the nucleotide edits, but not the endogenous target gene sequence on the edit strand. Accordingly, in some embodiments, an intended nucleotide edit is incorporated within the egRNA search target sequence. In some embodiments, the intended nucleotide edit is incorporated within about 1-10 nucleotides of the position corresponding to the PAM of the egRNA search target sequence.

[0234] The RT editing system can comprise: a nick guide RNA (egRNA), or a nucleic acid encoding the egRNA, wherein the egRNA comprises an egRNA spacer that is complementary to a second search target sequence in the target gene. The second search target sequence can be on the second strand of the target gene. The egRNA spacer can be from 16 to 22 nucleotides in length. In some embodiments, the length of the spacer varies from about 10 to about 100 nucleotides. In some embodiments, the spacer is 16 nucleotides, 17 nucleotides, 18 nucleotides, 19 nucleotides, 20 nucleotides, 21 nucleotides, 22 nucleotides, 23 nucleotides, 24 nucleotides, or 25 nucleotides in length. In some embodiments, the spacer is from 15 nucleotides to 30 nucleotides in length, 15 to 25 nucleotides in length, 18 to 22 nucleotides in length, 10 to 20 nucleotides in length, or 20 to 30 nucleotides in length. In some embodiments, the spacer is 16 to 22 nucleotides in length. In some embodiments, the spacer is 16 to 20 nucleotides in length. In some embodiments, the spacer is 17 to 18 nucleotides in length. In some embodiments, the egRNA spacer is 20 nucleotides in length. In some embodiments, the egRNA comprises a scaffold sequence. The scaffold sequence can comprise a nucleotide sequence selected from SEQ ID NOs: 1210-1266.

[0235] In some embodiments, the egRNA comprises a nucleotide sequence selected from SEQ ID NOs: 48-49, 498-555, and 1048-1049. In some embodiments, the egRNA comprises a nucleotide sequence selected from SEQ ID NOs: 48-49, 498-555, and 1048-1049 or a sequence have one, two, or three mismatches relative to a nucleotide sequence selected from SEQ ID NOs: 48-49, 498-555, and 1048-1049. In some embodiments, the egRNA comprises or consists of a nucleotide sequence selected from SEQ ID NOs: 48-49, 498-555, and 1048-1049 or a sequence at least 85% identical to a nucleotide sequence selected from SEQ ID NOs: 48-49, 498-555, and 1048-1049 (e.g., 85%, 86%, 87%, 88%, 89%, 90%, 91%, 92%, 93%, 94%, 95%, 96%, 97%, 98%, 99%, 100%, or a number or a range between any two of these values, identical to a nucleotide sequence selected from SEQ ID NOs: 48-49, 498-555, and 1048-1049).

[0236] Different tagRNAs can be used with different egRNAs. In some embodiments, the tagRNA comprises or consists of any one of SEQ ID NOs: 16-47 and the egRNA comprises or consists of SEQ ID NO: 48. In some embodiments, the tagRNA comprises or consists of any one of SEQ ID NOs: 16-47 and the egRNA comprises or consists of SEQ ID NO: 49.

[0237] In some embodiments, the egRNA spacer comprises a nucleotide sequence selected from SEQ ID NOs: 51-52. In some embodiments, the egRNA spacer comprises a nucleotide sequence selected from SEQ ID NOs: 51-52 or a sequence have one, two, or three mismatches relative to a nucleotide sequence selected from SEQ ID NOs: 51-52. In some embodiments, the egRNA spacer comprises or consists of a nucleotide sequence selected from SEQ ID NOs: 51-52 or a sequence at least 85% identical to a nucleotide sequence selected from SEQ ID NOs: 51-52 (e.g., 85%, 86%, 87%, 88%, 89%, 90%, 91%, 92%, 93%, 94%, 95%, 96%, 97%, 98%, 99%, 100%, or a number or a range between any two of these values, identical to a nucleotide sequence selected from SEQ ID NOs: 51-52).

[0238] In some embodiments, the intended nucleotide edit incorporation rate of the RT editing system is greater than at least about 30%, about 40%, about 50%, about 60%, about 70%, or about 80% (e.g., about 30%, 31%, 32%, 33%, 34%, 35%, 36%, 37%, 38%, 39%, 40%, 41%, 42%, 43%, 44%, 45%, 46%, 47%, 48%, 49%, 50%, 51%, 52%, 53%, 54%, 55%, 56%, 57%, 58%, 59%, 60%, 61%, 62%, 63%, 64%, 65%, 66%, 67%, 68%, 69%, 70%, 71%, 72%, 73%, 74%, 75%, 76%, 77%, 78%, 79%, 80%, 81%, 82%, 83%, 84%, 85%, 86%, 87%, 88%, 89%, 90%, 91%, 92%, 93%, 94%, 95%, 96%, 97%, 98%, 99%, 100%, or a number or a range between any two of these values).

[0239] Provided in Table 2A-Table 2B below are exemplary protein (Table 2A) and mRNA (Table 2B) sequences of RT Editors and components thereof. Table 2C provides exemplary RT Editor linker sequences.

TABLE 2A
RT EDITING PROTEIN AND COMPONENTS
NAME and SEQ ID NO

RT editor fusion (SEQ ID NO: 4)
bipartite SV40 NLS (SEQ ID NO: 5)
SPYCas9 R221K N394K H840A (SEQ ID NO: 6)
Linker (SEQ ID NO: 7)
codon optimized MMLV RT pentamutant (SEQ ID NO: 8)
Linker - SGGS* (SEQ ID NO: 9 or 10)
*may be repeated one or more times
bipartite SV40 NLS (SEQ ID NO: 11)
c-Myc NLS (SEQ ID NO: 12)
RT editor fusion cDNA (SEQ ID NO: 13)
Reference/wild-type SPYCas9 (SEQ ID NO: 14)
wild type MMLV RT (SEQ ID NO: 15)
M. georgiana RT (SEQ ID NO: 141)

TABLE 2B
EXEMPLARY mRNA SEQUENCES ENCODING RT EDITORS
NAME and SEQ ID NO

pPG275 mRNA (SEQ ID NO: 137)
pPG276 mRNA (SEQ ID NO: 138)
pPG277 mRNA (SEQ ID NO: 139)
pPG278 mRNA (SEQ ID NO: 140)
*For RNA, U are T in the sequence listing.

TABLE 2C
EXEMPLARY RT EDITOR LINKER SEQUENCES

| | Shorthand | | SEQ |
|---|---|---|---|
| Name | Sequence | AA Residues | ID NO |
| GS3 | (GGGGS)3 | GGGGSGGGGSGGGGS | 1026 |
| GS4 | (GGGGS)4 | GGGGSGGGGSGGGGSGGGGS | 1027 |
| GS5 | (GGGGS)5 | GGGGSGGGGSGGGGSGGGGSGGGGS | 1056 |
| GS6 | (GGGGS)6 | GGGGSGGGGSGGGGSGGGGSGGGGSGGGGS | 1057 |
| GS7 | (GGGGS)7 | GGGGSGGGGSGGGGSGGGGSGGGGSGGGGSGGGGS | 1028 |
| EAK3 | (EAAAK)3 | EAAAKEAAAKEAAAK | 1022 |
| EAK4 | (EAAAK)4 | EAAAKEAAAKEAAAKEAAAK | 1023 |
| EAK5 | (EAAAK)5 | EAAAKEAAAKEAAAKEAAAKEAAAK | 1058 |
| EAK6 | (EAAAK)6 | EAAAKEAAAKEAAAKEAAAKEAAAKEAAAK | 1024 |
| EAK7 | (EAAAK)7 | EAAAKEAAAKEAAAKEAAAKEAAAKEAAAKEAAAK | 1059 |
| AEAK4- | A(EAAAK)4ALEA | AEAAAKEAAAKEAAAKEAAAKALEAEAAAKEAAAKEA | 1020 |
| ALEA | (EAAAK)4A | AAKEAAAKA | |
| GS- | GSA(EAAAK)4AL | GSAEAAAKEAAAKEAAAKEAAAKALEAEAAAKEAAAKE | 1060 |
| AEAK4- | EA(EAAAK)4ASG | AAAKEAAAKASG | |
| ALEA | | | |
| GGS- | GGGGS(EAAAK)4 | GGGGSEAAAKEAAAKEAAAKEAAAKALEAEAAAKEAA | 1021 |
| AEAK4- | ALEA | AKEAAAKEAAAKSGGGG | |
| ALEA | (EAAAAK)4SGGG | | |
| | G | | |
| AEAK | AEAAAKEAAAK | AEAAAKEAAAKA | 1061 |
| | A | | |
| AEAK2 | (AEAAAKEAAAK | AEAAAKEAAAKAAEAAAKEAAAKA | 1019 |
| | A)2 | | |
| AEAK3 | (AEAAAKEAAAK | AEAAAKEAAAKAAEAAAKEAAAKAAEAAAKEAAAKA | 1062 |
| | A)3 | | |
| GGS- | GGGGS(EAAAK)3 | GGGGSEAAAKEAAAKEAAAKGGGGS | 1025 |
| EAK3- | GGGGS | | |
| SGG | | | |
| GGS- | GGGGS(EAAAK)4 | GGGGSEAAAKEAAAKEAAAKEAAAKGGGGS | 1063 |
| EAK4- | GGGGS | | |
| SGG | | | |
| GGS- | GGGGS(EAAAK)5 | GGGGSEAAAKEAAAKEAAAKEAAAKEAAAKGGGGS | 1064 |
| EAK5- | GGGGS | | |
| SGG | | | |
| GGS- | GGGGS(EAAAK)3 | GGGGSEAAAKEAAAKEAAAKGGSGGSGEAAAKEAAAKE | 1065 |
| EAK3- | GGSGGSG(EAAA | AAAKGGGGS | |
| GGS | K)3GGGGS | | |
| GSA-F | SGAGSAAGSGEF | GSAGSAAGSGEF | 1066 |
| | GS | | |
| GSA-F- | SGAGSAAGSGEF | GSAGSAAGSGEFEGSGSAASGASG | 1067 |
| flip | EGSGSAASGAGS | | |
| K19D | KESGSVSSEQLA | KESGSVSSEQLAQFRSLD | 1033 |
| | QFRSLD | | |
| E14T | EGKSSGSGSESKS | EGKSSGSGSESKST | 1032 |
| | T | | |
| PAPAP | PAPAP | PAPAP | 1068 |
| PAPAP-2 | (PAPAP)2 | PAPAPPAPAP | 1029 |
| PAPAP-3 | (PAPAP)3 | PAPAPPAPAPPAPAP | 1069 |
| PAPAP-4 | (PAPAP)4 | PAPAPPAPAPPAPAPPAPAP | 1030 |
| PAPAP-5 | (PAPAP)5 | PAPAPPAPAPPAPAPPAPAPPAPAP | 1070 |
| PAPAP-6 | (PAPAP)6 | PAPAPPAPAPPAPAPPAPAPPAPAPPAPAP | 1071 |
| PAPAP-7 | (PAPAP)7 | PAPAPPAPAPPAPAPPAPAPPAPAPPAPAPPAPAP | 1072 |
| PAPAP-8 | (PAPAP)8 | PAPAPPAPAPPAPAPPAPAPPAPAPPAPAPPAPAPPAPAP | 1031 |
| GS- | | SGGGGSSGSETPGTSESATPESSGGGGS | 1034 |
| XTEN16- | | | |
| GS | | | |
| SGGSx2- | | SGGSSGGSSGSETPGTSESATPESSGGSSGGS | 1035 |
| XTEN16- | | | |
| SGGSx2 | | | |
| GGS- | | SGGGGSAEAAAKEAAAKEAAAKEAAAKALEAEAAAKEA | 1073 |
| AEAK- | | AAKEAAAKEAAAKASGGGGS | |
| ALEA_ | | | |
| mod1-gs | | | |
| GS-NLS- | | SGGSSGGSKRTADGSEFESPKKKRKVSGGSSGGS | 1074 |
| GS_4-gs | | | |

[0240] Provided in Table 3 below are exemplary spacer and edit target sequences for editing ATP7B3 gene.

TABLE 3
EXEMPLARY SPACER AND PROTOSPACER SEQUENCES

| SEQ | | SEQ | |
|---|---|---|---|
| ID | | ID | |
| NO: | SPACER SEQUENCE¹ | NO: | PROTOSPACER SEQUENCE |
| 50 | UUGGUGACUGCCACGCCCAA | 53 | TTGGTGACTGCCACGCCCAA |
| 51 | GGCCAGCAGUGAACACCCCU | 54 | GGCCAGCAGTGAACACCCCT |
| 52 | GCCAGCAGUGAACACCCCUU | 55 | GCCAGCAGTGAACACCCCTT |
| 133 | UUUGGUGACUGCCACGCCCA | 135 | TTTGGTGACTGCCACGCCCA |
| 134 | CAGUGAACACCCCUUGGGCG | 136 | CAGTGAACACCCCTTGGGCG |

¹For RNA, U are T in the sequence listing.

[0241] The tables below provide sequences related to the gRNAs of the disclosure (e.g., tagRNA or egRNA). For guide RNA sequences, the spacer sequences are underlined, and the extension arms are bold. Descriptions provide information regarding, e.g., the length of the FBS and the homology or editing template (ET) region of the extension arm. As would be understood by a person of ordinary skill in the art, the extension arm can comprise, from 5′ to 3′, an editing template (comprising a homology region) and flap binding sequence (FB sequence; FBS). As also understood by the skilled person, the nucleotide thymine (T) is used in DNA sequences and uracil (U) in RNA sequences. In some embodiments, a “T” can represent “U” when the molecule is an RNA molecule. Provided in Table 4 below are exemplary tagRNA (e.g., long gRNA) and nicking guide RNA (egRNA) sequences of the disclosure.

TABLE 4
EXEMPLARY tagRNA AND egRNA SEQUENCES

| | | SEQ ID | |
|---|---|---|---|
| NAME | DESCRIPTION | NO: | SEQUENCE¹ |
| BK g050 | Mut1.Hom14. | 16 | UUGGUGACUGCCACGCCCAAgUUUUAGAGCUAGAAAUAGC |
| | FBS13 | | AAGUUAAAAUAAGGCUAGUCCGUUAUCAACUUGAAAAAGU |
| | | | GGCACCGAGUCGGUGCGCCAGCAGUGAACAcCCCUUGGG |
| | | | CGUGGCAGUCAUUUU |
| BK g051 | Mut1.Hom14. | 17 | UUGGUGACUGCCACGCCCAAgUUUUAGAGCUAGAAAUAGC |
| | FBS12 | | AAGUUAAAAUAAGGCUAGUCCGUUAUCAACUUGAAAAAGU |
| | | | GGCACCGAGUCGGUGCGCCAGCAGUGAACAcCCCUUGGG |
| | | | CGUGGCAGUCUUUU |
| BK g052 | Mut1.Hom14. | 18 | UUGGUGACUGCCACGCCCAAgUUUUAGAGCUAGAAAUAGC |
| | FBS11 | | AAGUUAAAAUAAGGCUAGUCCGUUAUCAACUUGAAAAAGU |
| | | | GGCACCGAGUCGGUGCGCCAGCAGUGAACAcCCCUUGGG |
| | | | CGUGGCAGUUUUU |
| BK g053 | Mut1.Hom14. | 19 | UUGGUGACUGCCACGCCCAAgUUUUAGAGCUAGAAAUAGC |
| | FBS10 | | AAGUUAAAAUAAGGCUAGUCCGUUAUCAACUUGAAAAAGU |
| | | | GGCACCGAGUCGGUGCGCCAGCAGUGAACAcCCCUUGGG |
| | | | CGUGGCAGUUUU |
| BK g054 | Mut1.Hom14. | 20 | UUGGUGACUGCCACGCCCAAgUUUUAGAGCUAGAAAUAGC |
| | FBS9 | | AAGUUAAAAUAAGGCUAGUCCGUUAUCAACUUGAAAAAGU |
| | | | GGCACCGAGUCGGUGCGCCAGCAGUGAACAcCCCUUGGG |
| | | | CGUGGCAUUUU |
| BK g055 | Mut1.Hom14. | 21 | UUGGUGACUGCCACGCCCAAgUUUUAGAGCUAGAAAUAGC |
| | FBS8 | | AAGUUAAAAUAAGGCUAGUCCGUUAUCAACUUGAAAAAGU |
| | | | GGCACCGAGUCGGUGCGCCAGCAGUGAACAcCCCUUGGG |
| | | | CGUGGCUUUU |
| BK g056 | Mut1.Hom14. | 22 | UUGGUGACUGCCACGCCCAAgUUUUAGAGCUAGAAAUAGC |
| | FBS7 | | AAGUUAAAAUAAGGCUAGUCCGUUAUCAACUUGAAAAAGU |
| | | | GGCACCGAGUCGGUGCGCCAGCAGUGAACAcCCCUUGGG |
| | | | CGUGGUUUU |
| BK g057 | Mut1.Hom14. | 23 | UUGGUGACUGCCACGCCCAAgUUUUAGAGCUAGAAAUAGC |
| | FBS6 | | AAGUUAAAAUAAGGCUAGUCCGUUAUCAACUUGAAAAAGU |
| | | | GGCACCGAGUCGGUGCGCCAGCAGUGAACAcCCCUUGGG |
| | | | CGUGUUUU |
| BK g058 | Mut1.Hom10. | 24 | UUGGUGACUGCCACGCCCAAgUUUUAGAGCUAGAAAUAGC |
| | FBS13 | | AAGUUAAAAUAAGGCUAGUCCGUUAUCAACUUGAAAAAGU |
| | | | GGCACCGAGUCGGUGCGCAGUGAACAcCCCUUGGGCGUG |
| | | | GCAGUCAUUUU |
| BK g059 | Mut1.Hom10. | 25 | UUGGUGACUGCCACGCCCAAgUUUUAGAGCUAGAAAUAGC |
| | FBS12 | | AAGUUAAAAUAAGGCUAGUCCGUUAUCAACUUGAAAAAGU |
| | | | GGCACCGAGUCGGUGCGCAGUGAACAcCCCUUGGGCGUG |
| | | | GCAGUCUUUU |
| BK g060 | Mut1.Hom10. | 26 | UUGGUGACUGCCACGCCCAAgUUUUAGAGCUAGAAAUAGC |
| | FBS11 | | AAGUUAAAAUAAGGCUAGUCCGUUAUCAACUUGAAAAAGU |
| | | | GGCACCGAGUCGGUGCGCAGUGAACAcCCCUUGGGCGUG |
| | | | GCAGUUUUU |
| BK g061 | Mut1.Hom10. | 27 | UUGGUGACUGCCACGCCCAAgUUUUAGAGCUAGAAAUAGC |
| | FBS10 | | AAGUUAAAAUAAGGCUAGUCCGUUAUCAACUUGAAAAAGU |
| | | | GGCACCGAGUCGGUGCGCAGUGAACAcCCCUUGGGCGUG |
| | | | GCAGUUUU |
| BK g062 | Mut1.Hom10. | 28 | UUGGUGACUGCCACGCCCAAgUUUUAGAGCUAGAAAUAGC |
| | FBS9 | | AAGUUAAAAUAAGGCUAGUCCGUUAUCAACUUGAAAAAGU |
| | | | GGCACCGAGUCGGUGCGCAGUGAACAcCCCUUGGGCGUG |
| | | | GCAUUUU |
| BK g063 | Mut1.Hom10. | 29 | UUGGUGACUGCCACGCCCAAgUUUUAGAGCUAGAAAUAGC |
| | FBS8 | | AAGUUAAAAUAAGGCUAGUCCGUUAUCAACUUGAAAAAGU |
| | | | GGCACCGAGUCGGUGCGCAGUGAACAcCCCUUGGGCGUG |
| | | | GCUUUU |
| BK g064 | Mut1.Hom10. | 30 | UUGGUGACUGCCACGCCCAAgUUUUAGAGCUAGAAAUAGC |
| | FBS7 | | AAGUUAAAAUAAGGCUAGUCCGUUAUCAACUUGAAAAAGU |
| | | | GGCACCGAGUCGGUGCGCAGUGAACAcCCCUUGGGCGUG |
| | | | GUUUU |
| BK g065 | Mut1.Hom10. | 31 | UUGGUGACUGCCACGCCCAAgUUUUAGAGCUAGAAAUAGC |
| | FBS6 | | AAGUUAAAAUAAGGCUAGUCCGUUAUCAACUUGAAAAAGU |
| | | | GGCACCGAGUCGGUGCGCAGUGAACAcCCCUUGGGCGUG |
| | | | UUUU |
| BK g066 | Mut1.Hom7. | 32 | UUGGUGACUGCCACGCCCAAgUUUUAGAGCUAGAAAUAGC |
| | FBS13 | | AAGUUAAAAUAAGGCUAGUCCGUUAUCAACUUGAAAAAGU |
| | | | GGCACCGAGUCGGUGCGUGAACAcCCCUUGGGCGUGGCA |
| | | | GUCAUUUU |
| BK g067 | Mut1.Hom7. | 33 | UUGGUGACUGCCACGCCCAAgUUUUAGAGCUAGAAAUAGC |
| | FBS12 | | AAGUUAAAAUAAGGCUAGUCCGUUAUCAACUUGAAAAAGU |
| | | | GGCACCGAGUCGGUGCGUGAACAcCCCUUGGGCGUGGCA |
| | | | GUCUUUU |
| BK g068 | Mut1.Hom7. | 34 | UUGGUGACUGCCACGCCCAAgUUUUAGAGCUAGAAAUAGC |
| | FBS11 | | AAGUUAAAAUAAGGCUAGUCCGUUAUCAACUUGAAAAAGU |
| | | | GGCACCGAGUCGGUGCGUGAACAcCCCUUGGGCGUGGCA |
| | | | GUUUUU |
| BK g069 | Mut1.Hom7. | 35 | UUGGUGACUGCCACGCCCAAgUUUUAGAGCUAGAAAUAGC |
| | FBS10 | | AAGUUAAAAUAAGGCUAGUCCGUUAUCAACUUGAAAAAGU |
| | | | GGCACCGAGUCGGUGCGUGAACAcCCCUUGGGCGUGGCA |
| | | | GUUUU |
| BK g070 | Mut1.Hom7.FBS9 | 36 | UUGGUGACUGCCACGCCCAAgUUUUAGAGCUAGAAAUAGC |
| | | | AAGUUAAAAUAAGGCUAGUCCGUUAUCAACUUGAAAAAGU |
| | | | GGCACCGAGUCGGUGCGUGAACAcCCCUUGGGCGUGGCA |
| | | | UUUU |
| BK g071 | Mut1.Hom7.FBS8 | 37 | UUGGUGACUGCCACGCCCAAgUUUUAGAGCUAGAAAUAGC |
| | | | AAGUUAAAAUAAGGCUAGUCCGUUAUCAACUUGAAAAAGU |
| | | | GGCACCGAGUCGGUGCGUGAACAcCCCUUGGGCGUGGCU |
| | | | UUU |
| BK g072 | Mut1.Hom7.FBS7 | 38 | UUGGUGACUGCCACGCCCAAgUUUUAGAGCUAGAAAUAGC |
| | | | AAGUUAAAAUAAGGCUAGUCCGUUAUCAACUUGAAAAAGU |
| | | | GGCACCGAGUCGGUGCGUGAACAcCCCUUGGGCGUGGUU |
| | | | UU |
| BK g073 | Mut1.Hom7.FBS6 | 39 | UUGGUGACUGCCACGCCCAAgUUUUAGAGCUAGAAAUAGC |
| | | | AAGUUAAAAUAAGGCUAGUCCGUUAUCAACUUGAAAAAGU |
| | | | GGCACCGAGUCGGUGCGUGAACAcCCCUUGGGCGUGUUU |
| | | | U |
| BK g074 | Mut1.Hom5. | 40 | UUGGUGACUGCCACGCCCAAgUUUUAGAGCUAGAAAUAGC |
| | FBS13 | | AAGUUAAAAUAAGGCUAGUCCGUUAUCAACUUGAAAAAGU |
| | | | GGCACCGAGUCGGUGCGAACAcCCCUUGGGCGUGGCAGU |
| | | | CAUUUU |
| BK g075 | Mut1.Hom5. | 41 | UUGGUGACUGCCACGCCCAAgUUUUAGAGCUAGAAAUAGC |
| | FBS12 | | AAGUUAAAAUAAGGCUAGUCCGUUAUCAACUUGAAAAAGU |
| | | | GGCACCGAGUCGGUGCGAACAcCCCUUGGGCGUGGCAGU |
| | | | CUUUU |
| BK g076 | Mut1.Hom5. | 42 | UUGGUGACUGCCACGCCCAAgUUUUAGAGCUAGAAAUAGC |
| | FBS11 | | AAGUUAAAAUAAGGCUAGUCCGUUAUCAACUUGAAAAAGU |
| | | | GGCACCGAGUCGGUGCGAACAcCCCUUGGGCGUGGCAGU |
| | | | UUUU |
| BK g077 | Mut1.Hom5. | 43 | UUGGUGACUGCCACGCCCAAgUUUUAGAGCUAGAAAUAGC |
| | FBS10 | | AAGUUAAAAUAAGGCUAGUCCGUUAUCAACUUGAAAAAGU |
| | | | GGCACCGAGUCGGUGCGAACAcCCCUUGGGCGUGGCAGU |
| | | | UUU |
| BK g078 | Mut1.Hom5.FBS9 | 44 | UUGGUGACUGCCACGCCCAAgUUUUAGAGCUAGAAAUAGC |
| | | | AAGUUAAAAUAAGGCUAGUCCGUUAUCAACUUGAAAAAGU |
| | | | GGCACCGAGUCGGUGCGAACAcCCCUUGGGCGUGGCAUU |
| | | | UU |
| BK g079 | Mut1.Hom5.FBS8 | 45 | UUGGUGACUGCCACGCCCAAgUUUUAGAGCUAGAAAUAGC |
| | | | AAGUUAAAAUAAGGCUAGUCCGUUAUCAACUUGAAAAAGU |
| | | | GGCACCGAGUCGGUGCGAACAcCCCUUGGGCGUGGCUUU |
| | | | U |
| BK g080 | Mut1.Hom5.FBS7 | 46 | UUGGUGACUGCCACGCCCAAgUUUUAGAGCUAGAAAUAGC |
| | | | AAGUUAAAAUAAGGCUAGUCCGUUAUCAACUUGAAAAAGU |
| | | | GGCACCGAGUCGGUGCGAACAcCCCUUGGGCGUGGUUUU |
| BK g081 | Mut1.Hom5.FBS6 | 47 | UUGGUGACUGCCACGCCCAAgUUUUAGAGCUAGAAAUAGC |
| | | | AAGUUAAAAUAAGGCUAGUCCGUUAUCAACUUGAAAAAGU |
| | | | GGCACCGAGUCGGUGCGAACAcCCCUUGGGCGUGUUUU |
| BK g040² | | 48 | GGCCAGCAGUGAACACCCCUGUUUUAGAGCUAGAAAUAGC |
| | | | AAGUUAAAAUAAGGCUAGUCCGUUAUCAACUUGAAAAAGU |
| | | | GGCACCGAGUCGGUGCUUUU |
| BK g041² | | 49 | GCCAGCAGUGAACACCCCUUGUUUUAGAGCUAGAAAUAGC |
| | | | AAGUUAAAAUAAGGCUAGUCCGUUAUCAACUUGAAAAAGU |
| | | | GGCACCGAGUCGGUGCUUUU |

¹For RNA, U are T in the sequence listing. For each entry, the spacer sequence is underlined and the extension arm is bold. The description indicates the length of the FBS and ET or homology region (Hom) of the extension arm.
²egRNA

TABLE 5
EXEMPLARY FLAP BINDING SEQUENCE (FBS) AND EDITING TEMPLATE
SEQUENCES

| | | | | | SEQ ID |
|---|---|---|---|---|---|
| NAME | DESCRIPTION | FBS¹ | SEQ ID NO: | EDITING TEMPLATE¹ | NO: |
| BK g050 | Mut1.Hom14.FBS13 | GGCGTGGCAGTCA | 91 | GCCAGCAGTGAACA | 95 |
| | | | | CCCCTTG | |
| BK g051 | Mut1.Hom14.FBS12 | GGCGTGGCAGTC | 92 | GCCAGCAGTGAACA | 95 |
| | | | | CCCCTTG | |
| BK g052 | Mut1.Hom14.FBS11 | GGCGTGGCAGT | 93 | GCCAGCAGTGAACA | 95 |
| | | | | CCCCTTG | |
| BK g053 | Mut1.Hom14.FBS10 | GGCGTGGCAG | 94 | GCCAGCAGTGAACA | 95 |
| | | | | CCCCTTG | |
| BK g054 | Mut1.Hom14.FBS9 | GGCGTGGCA | | GCCAGCAGTGAACA | 95 |
| | | | | CCCCTTG | |
| BK g055 | Mut1.Hom14.FBS8 | GGCGTGGC | | GCCAGCAGTGAACA | 95 |
| | | | | CCCCTTG | |
| BK g056 | Mut1.Hom14.FBS7 | GGCGTGG | | GCCAGCAGTGAACA | 95 |
| | | | | CCCCTTG | |
| BK g057 | Mut1.Hom14.FBS6 | GGCGTG | | GCCAGCAGTGAACA | 95 |
| | | | | CCCCTTG | |
| BK g058 | Mut1.Hom10.FBS13 | GGCGTGGCAGTCA | 91 | GCAGTGAACACCCC | \|96 |
| | | | | TTG | |
| BK g059 | Mut1.Hom10.FBS12 | GGCGTGGCAGTC | 92 | GCAGTGAACACCCC | 96 |
| | | | | TTG | |
| BK g060 | Mut1.Hom10.FBS11 | GGCGTGGCAGT | 93 | GCAGTGAACACCCC | 96 |
| | | | | TTG | |
| BK g061 | Mut1.Hom10.FBS10 | GGCGTGGCAG | 94 | GCAGTGAACACCCC | 96 |
| | | | | TTG | |
| BK g062 | Mut1.Hom10.FBS9 | GGCGTGGCA | | GCAGTGAACACCCC | 196 |
| | | | | TTG | |
| BK g063 | Mut1.Hom10.FBS8 | GGCGTGGC | | GCAGTGAACACCCC | 96 |
| | | | | TTG | |
| BK g064 | Mut1.Hom10.FBS7 | GGCGTGG | | GCAGTGAACACCCC | 96 |
| | | | | TTG | |
| BK g065 | Mut1.Hom10.FBS6 | GGCGTG | | GCAGTGAACACCCC | 96 |
| | | | | TTG | |
| BK g066 | Mut1.Hom7.FBS13 | GGCGTGGCAGTCA | 91 | GTGAACACCCCTTG | 97 |
| BK g067 | Mut1.Hom7.FBS12 | GGCGTGGCAGTC | 92 | GTGAACACCCCTTG | 97 |
| BK g068 | Mut1.Hom7.FBS11 | GGCGTGGCAGT | 93 | GTGAACACCCCTTG | 97 |
| BK g069 | Mut1.Hom7.FBS10 | GGCGTGGCAG | 94 | GTGAACAcCCCTTG | 97 |
| BK g070 | Mut1.Hom7.FBS9 | GGCGTGGCA | | GTGAACACCCCTTG | 97 |
| BK g071 | Mut1.Hom7.FBS8 | GGCGTGGC | | GTGAACACCCCTTG | 97 |
| BK g072 | Mut1.Hom7.FBS7 | GGCGTGG | | GTGAACAcCCCTTG | 97 |
| BK g073 | Mut1.Hom7.FBS6 | GGCGTG | | GTGAACAcCCCTTG | 97 |
| BK g074 | Mut1.Hom5.FBS13 | GGCGTGGCAGTCA | 91 | GAACACCCCTTG | 98 |
| BK g075 | Mut1.Hom5.FBS12 | GGCGTGGCAGTC | 92 | GAACACCCCTTG | 98 |
| BK g076 | Mut1.Hom5.FBS11 | GGCGTGGCAGT | 93 | GAACACCCCTTG | 98 |
| BK g077 | Mut1.Hom5.FBS10 | GGCGTGGCAG | 94 | GAACACCCCTTG | 98 |
| BK g078 | Mut1.Hom5.FBS9 | GGCGTGGCA | | GAACACCCCTTG | 98 |
| BK g079 | Mut1.Hom5.FBS8 | GGCGTGGC | | GAACACCCCTTG | 98 |
| BK g080 | Mut1.Hom5.FBS7 | GGCGTGG | | GAACACCCCTTG | 98 |
| BK g081 | Mut1.Hom5.FBS6 | GGCGTG | | GAACACCCCTTG | 98 |

¹For RNA, T is U; U are T in the sequence listing. The description indicates the length of the FBS and ET or homology region (Hom) of the extension arm.

TABLE 6
EXEMPLARY gRNAs

| NAME | SEQUENCE^{1,2} | SEQ ID NO: | DESCRIPTION |
|---|---|---|---|
| BK g050³ | mU*mU*mG*rGrUrGrArCrUrGrCrCrArCrGrCr | 99 | Human.ATP7B.NGG1.Mut1. |
| | CrCrArArGrUrUrUrUrArGrAmGmCmUmAmG | | Hom14.FBS13.mU*mU*mU*mU |
| | mAmAmAmUmAmGmCrArArGrUrUrArArArA | | |
| | rUrArArGrGrCrUrArGrUrCrCrGrUrUrArUrCm | | |
| | AmAmCmUmUmGmAmAmAmAmAmGmUmG | | |
| | mGmCmAmCmCmGmAmGmUmCmGmGmUm | | |
| | GmCrGrCrCrArGrCrArGrUrGrArArCrArC | | |
| | rCrCrCrUrUrGrGrGrCrGrUrGrGrCrArGrU | | |
| | rCrAmU*mU*mU*mU | | |
| BK g051³ | mU*mU*mG*rGrUrGrArCrUrGrCrCrArCrGrCr | 100 | Human.ATP7B.NGG1.Mut1. |
| | CrCrArArGrUrUrUrUrArGrAmGmCmUmAmG | | Hom14.FBS12.mU*mU*mU*mU |
| | mAmAmAmUmAmGmCrArArGrUrUrArArArA | | |
| | rUrArArGrGrCrUrArGrUrCrCrGrUrUrArUrCm | | |
| | AmAmCmUmUmGmAmAmAmAmAmGmUmG | | |
| | mGmCmAmCmCmGmAmGmUmCmGmGmUm | | |
| | GmCrGrCrCrArGrCrArGrUrGrArArCrArC | | |
| | rCrCrCrUrUrGrGrGrCrGrUrGrGrCrArGrU | | |
| | rCmU*mU*mU*mU | | |
| BK g052³ | mU*mU*mG*rGrUrGrArCrUrGrCrCrArCrGrCr | 101 | Human.ATP7B.NGG1.Mut1. |
| | CrCrArArGrUrUrUrUrArGrAmGmCmUmAmG | | Hom14.FBS11.mU*mU*mU*mU |
| | mAmAmAmUmAmGmCrArArGrUrUrArArArA | | |
| | rUrArArGrGrCrUrArGrUrCrCrGrUrUrArUrCm | | |
| | AmAmCmUmUmGmAmAmAmAmAmGmUmG | | |
| | mGmCmAmCmCmGmAmGmUmCmGmGmUm | | |
| | GmCrGrCrCrArGrCrArGrUrGrArArCrArC | | |
| | rCrCrCrUrUrGrGrGrCrGrUrGrGrCrArGrU | | |
| | mU*mU*mU*mU | | |
| BK g053³ | mU*mU*mG*rGrUrGrArCrUrGrCrCrArCrGrCr | 102 | Human.ATP7B.NGG1.Mut1. |
| | CrCrArArGrUrUrUrUrArGrAmGmCmUmAmG | | Hom14.FBS10.mU*mU*mU*mU |
| | mAmAmAmUmAmGmCrArArGrUrUrArArArA | | |
| | rUrArArGrGrCrUrArGrUrCrCrGrUrUrArUrCm | | |
| | AmAmCmUmUmGmAmAmAmAmAmGmUmG | | |
| | mGmCmAmCmCmGmAmGmUmCmGmGmUm | | |
| | GmCrGrCrCrArGrCrArGrUrGrArArCrArC | | |
| | rCrCrCrUrUrGrGrGrCrGrUrGrGrCrArGm | | |
| | U*mU*mU*mU | | |
| BK g054³ | mU*mU*mG*rGrUrGrArCrUrGrCrCrArCrGrCr | 103 | Human.ATP7B.NGG1.Mut1. |
| | CrCrArArGrUrUrUrUrArGrAmGmCmUmAmG | | Hom14.FBS9.mU*mU*mU*mU |
| | mAmAmAmUmAmGmCrArArGrUrUrArArArA | | |
| | rUrArArGrGrCrUrArGrUrCrCrGrUrUrArUrCm | | |
| | AmAmCmUmUmGmAmAmAmAmAmGmUmG | | |
| | mGmCmAmCmCmGmAmGmUmCmGmGmUm | | |
| | GmCrGrCrCrArGrCrArGrUrGrArArCrArC | | |
| | rCrCrCrUrUrGrGrGrCrGrUrGrGrCrAmU* | | |
| | mU*mU*mU | | |
| BK g055³ | mU*mU*mG*rGrUrGrArCrUrGrCrCrArCrGrCr | 104 | Human.ATP7B.NGG1.Mut1. |
| | CrCrArArGrUrUrUrUrArGrAmGmCmUmAmG | | Hom14.FBS8.mU*mU*mU*mU |
| | mAmAmAmUmAmGmCrArArGrUrUrArArArA | | |
| | rUrArArGrGrCrUrArGrUrCrCrGrUrUrArUrCm | | |
| | AmAmCmUmUmGmAmAmAmAmAmGmUmG | | |
| | mGmCmAmCmCmGmAmGmUmCmGmGmUm | | |
| | GmCrGrCrCrArGrCrArGrUrGrArArCrArC | | |
| | rCrCrCrUrUrGrGrGrCrGrUrGrGrCmU*mU | | |
| | *mU*mU | | |
| BK g056³ | mU*mU*mG*rGrUrGrArCrUrGrCrCrArCrGrCr | 105 | Human.ATP7B.NGG1.Mut1. |
| | CrCrArArGrUrUrUrUrArGrAmGmCmUmAmG | | Hom14.FBS7.mU*mU*mU*mU |
| | mAmAmAmUmAmGmCrArArGrUrUrArArArA | | |
| | rUrArArGrGrCrUrArGrUrCrCrGrUrUrArUrCm | | |
| | AmAmCmUmUmGmAmAmAmAmAmGmUmG | | |
| | mGmCmAmCmCmGmAmGmUmCmGmGmUm | | |
| | GmCrGrCrCrArGrCrArGrUrGrArArCrArC | | |
| | rCrCrCrUrUrGrGrGrCrGrUrGrGmU*mU* | | |
| | mU*mU | | |
| BK g057³ | mU*mU*mG*rGrUrGrArCrUrGrCrCrArCrGrCr | 106 | Human. ATP7B.NGG1.Mut1. |
| | CrCrArArGrUrUrUrUrArGrAmGmCmUmAmG | | Hom14.FBS6.mU*mU*mU*mU |
| | mAmAmAmUmAmGmCrArArGrUrUrArArArA | | |
| | rUrArArGrGrCrUrArGrUrCrCrGrUrUrArUrCm | | |
| | AmAmCmUmUmGmAmAmAmAmAmGmUmG | | |
| | mGmCmAmCmCmGmAmGmUmCmGmGmUm | | |
| | GmCrGrCrCrArGrCrArGrUrGrArArCrArC | | |
| | rCrCrCrUrUrGrGrGrCrGrUrGmU*mU*mU | | |
| | *mU | | |
| BK g058³ | mU*mU*mG*rGrUrGrArCrUrGrCrCrArCrGrCr | 107 | Human. ATP7B.NGG1.Mut1. |
| | CrCrArArGrUrUrUrUrArGrAmGmCmUmAmG | | Hom10.FBS13.mU*mU*mU*mU |
| | mAmAmAmUmAmGmCrArArGrUrUrArArArA | | |
| | rUrArArGrGrCrUrArGrUrCrCrGrUrUrArUrCm | | |
| | AmAmCmUmUmGmAmAmAmAmAmGmUmG | | |
| | mGmCmAmCmCmGmAmGmUmCmGmGmUm | | |
| | GmCrGrCrArGrUrGrArArCrArCrCrCrCrU | | |
| | rUrGrGrGrCrGrUrGrGrCrArGrUrCrAmU* | | |
| | mU*mU*mU | | |
| BK g059³ | mU*mU*mG*rGrUrGrArCrUrGrCrCrArCrGrCr | 108 | Human.ATP7B.NGG1.Mut1. |
| | CrCrArArGrUrUrUrUrArGrAmGmCmUmAmG | | Hom10.FBS12.mU*mU*mU*mU |
| | mAmAmAmUmAmGmCrArArGrUrUrArArArA | | |
| | rUrArArGrGrCrUrArGrUrCrCrGrUrUrArUrCm | | |
| | AmAmCmUmUmGmAmAmAmAmAmGmUmG | | |
| | mGmCmAmCmCmGmAmGmUmCmGmGmUm | | |
| | GmCrGrCrArGrUrGrArArCrArCrCrCrCrU | | |
| | rUrGrGrGrCrGrUrGrGrCrArGrUrCmU*mU | | |
| | *mU*mU | | |
| BK g060³ | mU*mU*mG*rGrUrGrArCrUrGrCrCrArCrGrCr | 109 | Human. ATP7B.NGG1.Mut1. |
| | CrCrArArGrUrUrUrUrArGrAmGmCmUmAmG | | Hom10.FBS11.mU*mU*mU*mU |
| | mAmAmAmUmAmGmCrArArGrUrUrArArArA | | |
| | rUrArArGrGrCrUrArGrUrCrCrGrUrUrArUrCm | | |
| | AmAmCmUmUmGmAmAmAmAmAmGmUmG | | |
| | mGmCmAmCmCmGmAmGmUmCmGmGmUm | | |
| | GmCrGrCrArGrUrGrArArCrArCrCrCrCrU | | |
| | rUrGrGrGrCrGrUrGrGrCrArGrUmU*mU* | | |
| | mU*mU | | |
| BK g061³ | mU*mU*mG*rGrUrGrArCrUrGrCrCrArCrGrCr | 110 | Human. ATP7B.NGG1.Mut1. |
| | CrCrArArGrUrUrUrUrArGrAmGmCmUmAmG | | Hom10.FBS10.mU*mU*mU*mU |
| | mAmAmAmUmAmGmCrArArGrUrUrArArArA | | |
| | rUrArArGrGrCrUrArGrUrCrCrGrUrUrArUrCm | | |
| | AmAmCmUmUmGmAmAmAmAmAmGmUmG | | |
| | mGmCmAmCmCmGmAmGmUmCmGmGmUm | | |
| | GmCrGrCrArGrUrGrArArCrArCrCrCrCrU | | |
| | rUrGrGrGrCrGrUrGrGrCrArGmU*mU*mU | | |
| | *mU | | |
| BK g062³ | mU*mU*mG*rGrUrGrArCrUrGrCrCrArCrGrCr | 111 | Human.ATP7B.NGG1.Mut1. |
| | CrCrArArGrUrUrUrUrArGrAmGmCmUmAmG | | Hom10.FBS9.mU*mU*mU*mU |
| | mAmAmAmUmAmGmCrArArGrUrUrArArArA | | |
| | rUrArArGrGrCrUrArGrUrCrCrGrUrUrArUrCm | | |
| | AmAmCmUmUmGmAmAmAmAmAmGmUmG | | |
| | mGmCmAmCmCmGmAmGmUmCmGmGmUm | | |
| | GmCrGrCrArGrUrGrArArCrArCrCrCrCrU | | |
| | rUrGrGrGrCrGrUrGrGrCrAmU*mU*mU*m | | |
| | U | | |
| BK g063³ | mU*mU*mG*rGrUrGrArCrUrGrCrCrArCrGrCr | 112 | Human.ATP7B.NGG1.Mut1. |
| | CrCrArArGrUrUrUrUrArGrAmGmCmUmAmG | | Hom10.FBS8.mU*mU*mU*mU |
| | mAmAmAmUmAmGmCrArArGrUrUrArArArA | | |
| | rUrArArGrGrCrUrArGrUrCrCrGrUrUrArUrCm | | |
| | AmAmCmUmUmGmAmAmAmAmAmGmUmG | | |
| | mGmCmAmCmCmGmAmGmUmCmGmGmUm | | |
| | GmCrGrCrArGrUrGrArArCrArCrCrCrCrU | | |
| | rUrGrGrGrCrGrUrGrGrCmU*mU*mU*mU | | |
| BK g064³ | mU*mU*mG*rGrUrGrArCrUrGrCrCrArCrGrCr | 113 | Human.ATP7B.NGG1.Mut1. |
| | CrCrArArGrUrUrUrUrArGrAmGmCmUmAmG | | Hom10.FBS7.mU*mU*mU*mU |
| | mAmAmAmUmAmGmCrArArGrUrUrArArArA | | |
| | rUrArArGrGrCrUrArGrUrCrCrGrUrUrArUrCm | | |
| | AmAmCmUmUmGmAmAmAmAmAmGmUmG | | |
| | mGmCmAmCmCmGmAmGmUmCmGmGmUm | | |
| | GmCrGrCrArGrUrGrArArCrArCrCrCrCrU | | |
| | rUrGrGrGrCrGrUrGrGmU*mU*mU*mU | | |
| BK g065³ | mU*mU*mG*rGrUrGrArCrUrGrCrCrArCrGrCr | 114 | Human.ATP7B.NGG1.Mut1. |
| | CrCrArArGrUrUrUrUrArGrAmGmCmUmAmG | | Hom10.FBS6.mU*mU*mU*mU |
| | mAmAmAmUmAmGmCrArArGrUrUrArArArA | | |
| | rUrArArGrGrCrUrArGrUrCrCrGrUrUrArUrCm | | |
| | AmAmCmUmUmGmAmAmAmAmAmGmUmG | | |
| | mGmCmAmCmCmGmAmGmUmCmGmGmUm | | |
| | GmCrGrCrArGrUrGrArArCrArCrCrCrCrU | | |
| | rUrGrGrGrCrGrUrGmU*mU*mU*mU | | |
| BK g066³ | mU*mU*mG*rGrUrGrArCrUrGrCrCrArCrGrCr | 115 | Human.ATP7B.NGG1.Mut1. |
| | CrCrArArGrUrUrUrUrArGrAmGmCmUmAmG | | Hom7.FBS13.mU*mU*mU*mU |
| | mAmAmAmUmAmGmCrArArGrUrUrArArArA | | |
| | rUrArArGrGrCrUrArGrUrCrCrGrUrUrArUrCm | | |
| | AmAmCmUmUmGmAmAmAmAmAmGmUmG | | |
| | mGmCmAmCmCmGmAmGmUmCmGmGmUm | | |
| | GmCrGrUrGrArArCrArCrCrCrCrUrUrGrG | | |
| | rGrCrGrUrGrGrCrArGrUrCrAmU*mU*mU | | |
| | *mU | | |
| BK g067³ | mU*mU*mG*rGrUrGrArCrUrGrCrCrArCrGrCr | 116 | Human.ATP7B.NGG1.Mut1. |
| | CrCrArArGrUrUrUrUrArGrAmGmCmUmAmG | | Hom7.FBS12.mU*mU*mU*mU |
| | mAmAmAmUmAmGmCrArArGrUrUrArArArA | | |
| | rUrArArGrGrCrUrArGrUrCrCrGrUrUrArUrCm | | |
| | AmAmCmUmUmGmAmAmAmAmAmGmUmG | | |
| | mGmCmAmCmCmGmAmGmUmCmGmGmUm | | |
| | GmCrGrUrGrArArCrArCrCrCrCrUrUrGrG | | |
| | rGrCrGrUrGrGrCrArGrUrCmU*mU*mU*m | | |
| | U | | |
| BK g068³ | mU*mU*mG*rGrUrGrArCrUrGrCrCrArCrGrCr | 117 | Human.ATP7B.NGG1.Mut1. |
| | CrCrArArGrUrUrUrUrArGrAmGmCmUmAmG | | Hom7.FBS11.mU*mU*mU*mU |
| | mAmAmAmUmAmGmCrArArGrUrUrArArArA | | |
| | rUrArArGrGrCrUrArGrUrCrCrGrUrUrArUrCm | | |
| | AmAmCmUmUmGmAmAmAmAmAmGmUmG | | |
| | mGmCmAmCmCmGmAmGmUmCmGmGmUm | | |
| | GmCrGrUrGrArArCrArCrCrCrCrUrUrGrG | | |
| | rGrCrGrUrGrGrCrArGrUmU*mU*mU*mU | | |
| BK g069³ | mU*mU*mG*rGrUrGrArCrUrGrCrCrArCrGrCr | 118 | Human.ATP7B.NGG1.Mut1. |
| | CrCrArArGrUrUrUrUrArGrAmGmCmUmAmG | | Hom7.FBS10.mU*mU*mU*mU |
| | mAmAmAmUmAmGmCrArArGrUrUrArArArA | | |
| | rUrArArGrGrCrUrArGrUrCrCrGrUrUrArUrCm | | |
| | AmAmCmUmUmGmAmAmAmAmAmGmUmG | | |
| | mGmCmAmCmCmGmAmGmUmCmGmGmUm | | |
| | GmCrGrUrGrArArCrArCrCrCrCrUrUrGrG | | |
| | rGrCrGrUrGrGrCrArGmU*mU*mU*mU | | |
| BK g070³ | mU*mU*mG*rGrUrGrArCrUrGrCrCrArCrGrCr | 119 | Human.ATP7B.NGG1.Mut1. |
| | CrCrArArGrUrUrUrUrArGrAmGmCmUmAmG | | Hom7.FBS9.mU*mU*mU*mU |
| | mAmAmAmUmAmGmCrArArGrUrUrArArArA | | |
| | rUrArArGrGrCrUrArGrUrCrCrGrUrUrArUrCm | | |
| | AmAmCmUmUmGmAmAmAmAmAmGmUmG | | |
| | mGmCmAmCmCmGmAmGmUmCmGmGmUm | | |
| | GmCrGrUrGrArArCrArCrCrCrCrUrUrGrG | | |
| | rGrCrGrUrGrGrCrAmU*mU*mU*mU | | |
| BK g071³ | mU*mU*mG*rGrUrGrArCrUrGrCrCrArCrGrCr | 120 | Human.ATP7B.NGG1.Mut1. |
| | CrCrArArGrUrUrUrUrArGrAmGmCmUmAmG | | Hom7.FBS8.mU*mU*mU*mU |
| | mAmAmAmUmAmGmCrArArGrUrUrArArArA | | |
| | rUrArArGrGrCrUrArGrUrCrCrGrUrUrArUrCm | | |
| | AmAmCmUmUmGmAmAmAmAmAmGmUmG | | |
| | mGmCmAmCmCmGmAmGmUmCmGmGmUm | | |
| | GmCrGrUrGrArArCrArCrCrCrCrUrUrGrG | | |
| | rGrCrGrUrGrGrCmU*mU*mU*mU | | |
| BK g072³ | mU*mU*mG*rGrUrGrArCrUrGrCrCrArCrGrCr | 121 | Human. ATP7B.NGG1.Mut1. |
| | CrCrArArGrUrUrUrUrArGrAmGmCmUmAmG | | Hom7.FBS7.mU*mU*mU*mU |
| | mAmAmAmUmAmGmCrArArGrUrUrArArArA | | |
| | rUrArArGrGrCrUrArGrUrCrCrGrUrUrArUrCm | | |
| | AmAmCmUmUmGmAmAmAmAmAmGmUmG | | |
| | mGmCmAmCmCmGmAmGmUmCmGmGmUm | | |
| | GmCrGrUrGrArArCrArCrCrCrCrUrUrGrG | | |
| | rGrCrGrUrGrGmU*mU*mU*mU | | |
| BK g073³ | mU*mU*mG*rGrUrGrArCrUrGrCrCrArCrGrCr | 122 | Human.ATP7B.NGG1.Mut1. |
| | CrCrArArGrUrUrUrUrArGrAmGmCmUmAmG | | Hom7.FBS6.mU*mU*mU*mU |
| | mAmAmAmUmAmGmCrArArGrUrUrArArArA | | |
| | rUrArArGrGrCrUrArGrUrCrCrGrUrUrArUrCm | | |
| | AmAmCmUmUmGmAmAmAmAmAmGmUmG | | |
| | mGmCmAmCmCmGmAmGmUmCmGmGmUm | | |
| | GmCrGrUrGrArArCrArCrCrCrCrUrUrGrG | | |
| | rGrCrGrUrGmU*mU*mU*mU | | |
| BK g074³ | mU*mU*mG*rGrUrGrArCrUrGrCrCrArCrGrCr | 123 | Human. ATP7B.NGG1.Mut1. |
| | CrCrArArGrUrUrUrUrArGrAmGmCmUmAmG | | Hom5.FBS13.mU*mU*mU*mU |
| | mAmAmAmUmAmGmCrArArGrUrUrArArArA | | |
| | rUrArArGrGrCrUrArGrUrCrCrGrUrUrArUrCm | | |
| | AmAmCmUmUmGmAmAmAmAmAmGmUmG | | |
| | mGmCmAmCmCmGmAmGmUmCmGmGmUm | | |
| | GmCrGrArArCrArCrCrCrCrUrUrGrGrGrC | | |
| | rGrUrGrGrCrArGrUrCrAmU*mU*mU*mU | | |
| BK g075³ | mU*mU*mG*rGrUrGrArCrUrGrCrCrArCrGrCr | 124 | Human.ATP7B.NGG1.Mut1. |
| | CrCrArArGrUrUrUrUrArGrAmGmCmUmAmG | | Hom5.FBS12.mU*mU*mU*mU |
| | mAmAmAmUmAmGmCrArArGrUrUrArArArA | | |
| | rUrArArGrGrCrUrArGrUrCrCrGrUrUrArUrCm | | |
| | AmAmCmUmUmGmAmAmAmAmAmGmUmG | | |
| | mGmCmAmCmCmGmAmGmUmCmGmGmUm | | |
| | GmCrGrArArCrArCrCrCrCrUrUrGrGrGrC | | |
| | rGrUrGrGrCrArGrUrCmU*mU*mU*mU | | |
| BK g076³ | mU*mU*mG*rGrUrGrArCrUrGrCrCrArCrGrCr | 125 | Human.ATP7B.NGG1.Mut1. |
| | CrCrArArGrUrUrUrUrArGrAmGmCmUmAmG | | Hom5.FBS11.mU*mU*mU*mU |
| | mAmAmAmUmAmGmCrArArGrUrUrArArArA | | |
| | rUrArArGrGrCrUrArGrUrCrCrGrUrUrArUrCm | | |
| | AmAmCmUmUmGmAmAmAmAmAmGmUmG | | |
| | mGmCmAmCmCmGmAmGmUmCmGmGmUm | | |
| | GmCrGrArArCrArCrCrCrCrUrUrGrGrGrC | | |
| | rGrUrGrGrCrArGrUmU*mU*mU*mU | | |
| BK g077³ | mU*mU*mG*rGrUrGrArCrUrGrCrCrArCrGrCr | 126 | Human.ATP7B.NGG1.Mut1. |
| | CrCrArArGrUrUrUrUrArGrAmGmCmUmAmG | | Hom5.FBS10.mU*mU*mU*mU |
| | mAmAmAmUmAmGmCrArArGrUrUrArArArA | | |
| | rUrArArGrGrCrUrArGrUrCrCrGrUrUrArUrCm | | |
| | AmAmCmUmUmGmAmAmAmAmAmGmUmG | | |
| | mGmCmAmCmCmGmAmGmUmCmGmGmUm | | |
| | GmCrGrArArCrArCrCrCrCrUrUrGrGrGrC | | |
| | rGrUrGrGrCrArGmU*mU*mU*mU | | |
| BK g078³ | mU*mU*mG*rGrUrGrArCrUrGrCrCrArCrGrCr | 127 | Human.ATP7B.NGG1.Mut1. |
| | CrCrArArGrUrUrUrUrArGrAmGmCmUmAmG | | Hom5.FBS9.mU*mU*mU*mU |
| | mAmAmAmUmAmGmCrArArGrUrUrArArArA | | |
| | rUrArArGrGrCrUrArGrUrCrCrGrUrUrArUrCm | | |
| | AmAmCmUmUmGmAmAmAmAmAmGmUmG | | |
| | mGmCmAmCmCmGmAmGmUmCmGmGmUm | | |
| | GmCrGrArArCrArCrCrCrCrUrUrGrGrGrC | | |
| | rGrUrGrGrCrAmU*mU*mU*mU | | |
| BK g079³ | mU*mU*mG*rGrUrGrArCrUrGrCrCrArCrGrCr | 128 | Human.ATP7B.NGG1.Mut1. |
| | CrCrArArGrUrUrUrUrArGrAmGmCmUmAmG | | Hom5.FBS8.mU*mU*mU*mU |
| | mAmAmAmUmAmGmCrArArGrUrUrArArArA | | |
| | rUrArArGrGrCrUrArGrUrCrCrGrUrUrArUrCm | | |
| | AmAmCmUmUmGmAmAmAmAmAmGmUmG | | |
| | mGmCmAmCmCmGmAmGmUmCmGmGmUm | | |
| | GmCrGrArArCrArCrCrCrCrUrUrGrGrGrC | | |
| | rGrUrGrGrCmU*mU*mU*mU | | |
| BK g080³ | mU*mU*mG*rGrUrGrArCrUrGrCrCrArCrGrCr | 129 | Human.ATP7B.NGG1.Mut1. |
| | CrCrArArGrUrUrUrUrArGrAmGmCmUmAmG | | Hom5.FBS7.mU*mU*mU*mU |
| | mAmAmAmUmAmGmCrArArGrUrUrArArArA | | |
| | rUrArArGrGrCrUrArGrUrCrCrGrUrUrArUrCm | | |
| | AmAmCmUmUmGmAmAmAmAmAmGmUmG | | |
| | mGmCmAmCmCmGmAmGmUmCmGmGmUm | | |
| | GmCrGrArArCrArCrCrCrCrUrUrGrGrGrC | | |
| | rGrUrGrGmU*mU*mU*mU | | |
| BK g081³ | mU*mU*mG*rGrUrGrArCrUrGrCrCrArCrGrCr | 130 | Human.ATP7B.NGG1.Mut1. |
| | CrCrArArGrUrUrUrUrArGrAmGmCmUmAmG | | Hom5.FBS6.mU*mU*mU*mU |
| | mAmAmAmUmAmGmCrArArGrUrUrArArArA | | |
| | rUrArArGrGrCrUrArGrUrCrCrGrUrUrArUrCm | | |
| | AmAmCmUmUmGmAmAmAmAmAmGmUmG | | |
| | mGmCmAmCmCmGmAmGmUmCmGmGmUm | | |
| | GmCrGrArArCrArCrCrCrCrUrUrGrGrGrC | | |
| | rGrUrGmU*mU*mU*mU | | |
| BK g040⁴ | mG*mG*mC*rCrArGrCrArGrUrGrArArCrArCr | 131 | Human.ATP7B.Mut1.3b.1.mU* |
| | CrCrCrUrGrUrUrUrUrArGrAmGmCmUmAmG | | mU*mU*mU.NGG2 |
| | mAmAmAmUmAmGmCrArArGrUrUrArArArA | | |
| | rUrArArGrGrCrUrArGrUrCrCrGrUrUrArUrCm | | |
| | AmAmCmUmUmGmAmAmAmAmAmGmUmG | | |
| | mGmCmAmCmCmGmAmGmUmCmGmGmUm | | |
| | GmCmU*mU*mU*mU | | |
| BK g041⁴ | mG*mC*mC*rArGrCrArGrUrGrArArCrArCrCr | 132 | Human.ATP7B.Mut1.3b.2.mU* |
| | CrCrUrUrGrUrUrUrUrArGrAmGmCmUmAmG | | mU*mU*mU.NGG2 |
| | mAmAmAmUmAmGmCrArArGrUrUrArArArA | | |
| | rUrArArGrGrCrUrArGrUrCrCrGrUrUrArUrCm | | |
| | AmAmCmUmUmGmAmAmAmAmAmGmUmG | | |
| | mGmCmAmCmCmGmAmGmUmCmGmGmUm | | |
| | GmCmU*mU*mU*mU | | |

¹For RNA, U are T in the sequence listing. For each entry, the spacer sequence is underlined and the extension arm is bold. The description indicates the length of the FBS and ET or homology region (Hom) of the extension arm.
²For the sequences: * , phosphorothioate modification; mN, 2′O-methyl modification; rN, unmodified ribonucleotide. N = A, C, T/U, G.
³tagRNA
⁴egRNA

TABLE 7
EXEMPLARY tagRNAs

| | | | SEQ ID |
|---|---|---|---|
| NAME | DESCRIPTION | SEQUENCE^{1,2} | NO: |
| PG g060 | Human.ATP7B.NGG1. | mU*mU*mG*rGrUrGrArCrUrGrCrCrArCrGrCrCrCrA | 164 |
| | Mut1.Hom7.FBS8.mU*mU* | rArGrUrUrUrUrArGrAmGmCmUmAmGmAmAmAm | |
| | mU*mU.ET14OMe | UmAmGmCrArArGrUrUrArArArArUrArArGrGrCrUr | |
| | | ArGrUrCrCrGrUrUrArUrCmAmAmCmUmUmGmAm | |
| | | AmAmAmAmGmUmGmGmCmAmCmCmGmAmGm | |
| | | UmCmGmGmUmGmCmGmUmGmAmAmCmAmC | |
| | | mCmCmCmUmUmGrGrGrCrGrUrGrGrCmU*mU | |
| | | *mU*mU | |
| PG g061 | Human.ATP7B.NGG1. | mU*mU*mG*rGrUrGrArCrUrGrCrCrArCrGrCrCrCrA | 165 |
| | Mut1.Hom7.FBS8.mU*mU* | rArGrUrUrUrUrArGrAmGmCmUmAmGmAmAmAm | |
| | mU*mU.FBS8OMe | UmAmGmCrArArGrUrUrArArArArUrArArGrGrCrUr | |
| | | ArGrUrCrCrGrUrUrArUrCmAmAmCmUmUmGmAm | |
| | | AmAmAmAmGmUmGmGmCmAmCmCmGmAmGm | |
| | | UmCmGmGmUmGmCrGrUrGrArArCrArCrCrCrC | |
| | | rUrUrGmGmGmCmGmUmGmGmCmU*mU*mU* | |
| | | mU | |
| PG g062 | Human.ATP7B.NGG1. | mU*mU*mG*rGrUrGrArCrUrGrCrCrArCrGrCrCrCrA | 166 |
| | Mut1.Hom7.FBS8.mU*mU* | rArGrUrUrUrUrArGrAmGmCmUmAmGmAmAmAm | |
| | mU*mU.ET14OMe.FBS8OMe | UmAmGmCrArArGrUrUrArArArArUrArArGrGrCrUr | |
| | | ArGrUrCrCrGrUrUrArUrCmAmAmCmUmUmGmAm | |
| | | AmAmAmAmGmUmGmGmCmAmCmCmGmAmGm | |
| | | UmCmGmGmUmGmCmGmUmGmAmAmCmAmC | |
| | | mCmCmCmUmUmGmGmGmCmGmUmGmGmC | |
| | | mU*mU*mU*mU | |
| PG g063 | Human.ATP7B.NGG1. | mU*mU*mG*rGrUrGrArCrUrGrCrCrArCrGrCrCrCrA | 167 |
| | Mut1.Hom7.FBS8.mU*mU* | rArGrUrUrUrUrArGrAmGmCmUmAmGmAmAmAm | |
| | mU*mU.ET7OMe | UmAmGmCrArArGrUrUrArArArArUrArArGrGrCrUr | |
| | | ArGrUrCrCrGrUrUrArUrCmAmAmCmUmUmGmAm | |
| | | AmAmAmAmGmUmGmGmCmAmCmCmGmAmGm | |
| | | UmCmGmGmUmGmCrGmUrGmArAmCrAmCrC | |
| | | mCrCmUrUmGrGrGrCrGrUrGrGrCmU*mU*mU | |
| | | *mU | |
| PG g064 | Human.ATP7B.NGG1. | mU*mU*mG*rGrUrGrArCrUrGrCrCrArCrGrCrCrCrA | 168 |
| | Mut1.Hom7.FBS8.mU*mU* | rArGrUrUrUrUrArGrAmGmCmUmAmGmAmAmAm | |
| | mU*mU.FBS4OMe | UmAmGmCrArArGrUrUrArArArArUrArArGrGrCrUr | |
| | | ArGrUrCrCrGrUrUrArUrCmAmAmCmUmUmGmAm | |
| | | AmAmAmAmGmUmGmGmCmAmCmCmGmAmGm | |
| | | UmCmGmGmUmGmCrGrUrGrArArCrArCrCrCrC | |
| | | rUrUrGrGmGrCmGrUmGrGmCmU*mU*mU*mU | |
| PG g065 | Human.ATP7B.NGG1. | mU*mU*mG*rGrUrGrArCrUrGrCrCrArCrGrCrCrCrA | 169 |
| | Mut1.Hom7.FBS8.mU*mU* | rArGrUrUrUrUrArGrAmGmCmUmAmGmAmAmAm | |
| | mU*mU.ET7OMe.FBS4OMe | UmAmGmCrArArGrUrUrArArArArUrArArGrGrCrUr | |
| | | ArGrUrCrCrGrUrUrArUrCmAmAmCmUmUmGmAm | |
| | | AmAmAmAmGmUmGmGmCmAmCmCmGmAmGm | |
| | | UmCmGmGmUmGmCrGm UrGmArAmCrAmCrC | |
| | | mCrCmUrUmGrGmGrCmGrUmGrGmCmU*mU* | |
| | | mU*mU | |
| PG g066 | Human.ATP7B.NGG1. | mU*mU*mG*rGrUrGrArCrUrGrCrCrArCrGrCrCrCrA | 170 |
| | Mut1.Hom7.FBS8.mU*mU* | rArGrUrUrUrUrArGrAmGmCmUmAmGmAmAmAm | |
| | mU*mU.ET4OMe | UmAmGmCrArArGrUrUrArArArArUrArArGrGrCrUr | |
| | | ArGrUrCrCrGrUrUrArUrCmAmAmCmUmUmGmAm | |
| | | AmAmAmAmGmUmGmGmCmAmCmCmGmAmGm | |
| | | UmCmGmGmUmGmCrGrUmGrArAmCrArCmCrC | |
| | | rCmUrUrGrGrGrCrGrUrGrGrCmU*mU*mU*mU | |
| PG g067 | Human.ATP7B.NGG1. | mU*mU*mG*rGrUrGrArCrUrGrCrCrArCrGrCrCrCrA | 171 |
| | Mut1.Hom7.FBS8.mU*mU* | rArGrUrUrUrUrArGrAmGmCmUmAmGmAmAmAm | |
| | mU*mU.FBS3OMe | UmAmGmCrArArGrUrUrArArArArUrArArGrGrCrUr | |
| | | ArGrUrCrCrGrUrUrArUrCmAmAmCmUmUmGmAm | |
| | | AmAmAmAmGmUmGmGmCmAmCmCmGmAmGm | |
| | | UmCmGmGmUmGmCrGrUrGrArArCrArCrCrCrC | |
| | | rUrUrGmGrGrCmGrUrGmGrCmU*mU*mU*mU | |
| PG g068 | Human.ATP7B.NGG1. | mU*mU*mG*rGrUrGrArCrUrGrCrCrArCrGrCrCrCrA | 172 |
| | Mut1.Hom7.FBS8.mU*mU* | rArGrUrUrUrUrArGrAmGmCmUmAmGmAmAmAm | |
| | mU*mU.ET4OMe.FBS3OMe | UmAmGmCrArArGrUrUrArArArArUrArArGrGrCrUr | |
| | | ArGrUrCrCrGrUrUrArUrCmAmAmCmUmUmGmAm | |
| | | AmAmAmAmGmUmGmGmCmAmCmCmGmAmGm | |
| | | UmCmGmGmUmGmCrGrUmGrArAmCrArCmCrC | |
| | | rCmUrUrGmGrGrCmGrUrGmGrCmU*mU*mU* | |
| | | mU | |
| PG g069 | Human.ATP7B.NGG1. | mU*mU*mG*rGrUrGrArCrUrGrCrCrArCrGrCrCrCrA | 173 |
| | Mut1.Hom7.FBS8.mU*mU* | rArGrUrUrUrUrArGrAmGmCmUmAmGmAmAmAm | |
| | mU*mU.ET14F | UmAmGmCrArArGrUrUrArArArArUrArArGrGrCrUr | |
| | | ArGrUrCrCrGrUrUrArUrCmAmAmCmUmUmGmAm | |
| | | AmAmAmAmGmUmGmGmCmAmCmCmGmAmGm | |
| | | UmCmGmGmUmGmC/i2FG//i2FU//i2FG//i2FA//i2FA// | |
| | | i2FC//i2FA//i2FC//i2FC//i2FC//i2FC//i2FU//i2FU// | |
| | | i2FG/rGrGrCrGrUrGrGrCmU*mU*mU*mU | |
| PG g070 | Human.ATP7B.NGG1. | mU*mU*mG*rGrUrGrArCrUrGrCrCrArCrGrCrCrCrA | 174 |
| | Mut1.Hom7.FBS8.mU*mU* | rArGrUrUrUrUrArGrAmGmCmUmAmGmAmAmAm | |
| | mU*mU.FBS8F | UmAmGmCrArArGrUrUrArArArArUrArArGrGrCrUr | |
| | | ArGrUrCrCrGrUrUrArUrCmAmAmCmUmUmGmAm | |
| | | AmAmAmAmGmUmGmGmCmAmCmCmGmAmGm | |
| | | UmCmGmGmUmGmCrGrUrGrArArCrArCrCrCrC | |
| | | rUrUrG/i2FG//i2FG//i2FC//i2FG//i2FU//i2FG//i2FG// | |
| | | i2FC/mU*mU*mU*mU | |
| PG g071 | Human.ATP7B.NGG1. | mU*mU*mG*rGrUrGrArCrUrGrCrCrArCrGrCrCrCrA | 175 |
| | Mut1.Hom7.FBS8.mU*mU* | rArGrUrUrUrUrArGrAmGmCmUmAmGmAmAmAm | |
| | mU*mU.ET14F.FBS8F | UmAmGmCrArArGrUrUrArArArArUrArArGrGrCrUr | |
| | | ArGrUrCrCrGrUrUrArUrCmAmAmCmUmUmGmAm | |
| | | AmAmAmAmGmUmGmGmCmAmCmCmGmAmGm | |
| | | UmCmGmGmUmGmC/i2FG//i2FU//i2FG//i2FA//i2FA// | |
| | | i2FC//i2FA//i2FC//i2FC//i2FC//i2FC//i2FU//i2FU// | |
| | | i2FG//i2FG//i2FG//i2FC//i2FG//i2FU//i2FG//i2FG// | |
| | | i2FC/mU*mU*mU*mU | |
| PG g072 | Human.ATP7B.NGG1. | mU*mU*mG*rGrUrGrArCrUrGrCrCrArCrGrCrCrCrA | 176 |
| | Mut1.Hom7.FBS8.mU*mU* | rArGrUrUrUrUrArGrAmGmCmUmAmGmAmAmAm | |
| | mU*mU.ET7F | UmAmGmCrArArGrUrUrArArArArUrArArGrGrCrUr | |
| | | ArGrUrCrCrGrUrUrArUrCmAmAmCmUmUmGmAm | |
| | | AmAmAmAmGmUmGmGmCmAmCmCmGmAmGm | |
| | | UmCmGmGmUmGmCrG/i2FU/rG/i2FA/rA/i2FC/rA/ | |
| | | i2FC/rC/i2FC/rC/i2FU/rU/i2FG/rGrGrCrGrUrGr | |
| | | GrCmU*mU*mU*mU | |
| PG g073 | Human.ATP7B.NGG1. | mU*mU*mG*rGrUrGrArCrUrGrCrCrArCrGrCrCrCrA | 177 |
| | Mut1.Hom7.FBS8.mU*mU* | rArGrUrUrUrUrArGrAmGmCmUmAmGmAmAmAm | |
| | mU*mU.FBS4F | UmAmGmCrArArGrUrUrArArArArUrArArGrGrCrUr | |
| | | ArGrUrCrCrGrUrUrArUrCmAmAmCmUmUmGmAm | |
| | | AmAmAmAmGmUmGmGmCmAmCmCmGmAmGm | |
| | | UmCmGmGmUmGmCrGrUrGrArArCrArCrCrCrC | |
| | | rUrUrGrG/i2FG/rC/i2FG/rU/i2FG/rG/i2FC/mU*m | |
| | | U*mU*mU | |
| PG g074 | Human.ATP7B.NGG1. | mU*mU*mG*rGrUrGrArCrUrGrCrCrArCrGrCrCrCrA | 178 |
| | Mut1.Hom7.FBS8.mU*mU* | rArGrUrUrUrUrArGrAmGmCmUmAmGmAmAmAm | |
| | mU*mU.ET7F.FBS4F | UmAmGmCrArArGrUrUrArArArArUrArArGrGrCrUr | |
| | | ArGrUrCrCrGrUrUrArUrCmAmAmCmUmUmGmAm | |
| | | AmAmAmAmGmUmGmGmCmAmCmCmGmAmGm | |
| | | UmCmGmGmUmGmCrG/i2FU/rG/i2FA/rA/i2FC/rA/ | |
| | | i2FC/rC/i2FC/rC/i2FU/rU/i2FG/rG/i2FG/rC/i2FG/rU/ | |
| | | i2FG/rG/i2FC/mU*mU*mU*mU | |
| PG g075 | Human.ATP7B.NGG1. | mU*mU*mG*rGrUrGrArCrUrGrCrCrArCrGrCrCrCrA | 179 |
| | Mut1.Hom7.FBS8.mU*mU* | rArGrUrUrUrUrArGrAmGmCmUmAmGmAmAmAm | |
| | mU*mU.ET4F | UmAmGmCrArArGrUrUrArArArArUrArArGrGrCrUr | |
| | | ArGrUrCrCrGrUrUrArUrCmAmAmCmUmUmGmAm | |
| | | AmAmAmAmGmUmGmGmCmAmCmCmGmAmGm | |
| | | UmCmGmGmUmGmCrGrU/i2FG/rArA/i2FC/rArC/ | |
| | | i2FC/rCrC/i2FU/rUrGrGrGrCrGrUrGrGrCmU*m | |
| | | U*mU*mU | |
| PG g076 | Human.ATP7B.NGG1. | mU*mU*mG*rGrUrGrArCrUrGrCrCrArCrGrCrCrCrA | 180 |
| | Mut1.Hom7.FBS8.mU*mU* | rArGrUrUrUrUrArGrAmGmCmUmAmGmAmAmAm | |
| | mU*mU.FBS3F | UmAmGmCrArArGrUrUrArArArArUrArArGrGrCrUr | |
| | | ArGrUrCrCrGrUrUrArUrCmAmAmCmUmUmGmAm | |
| | | AmAmAmAmGmUmGmGmCmAmCmCmGmAmGm | |
| | | UmCmGmGmUmGmCrGrUrGrArArCrArCrCrCrC | |
| | | rUrUrG/i2FG/rGrC/i2FG/rUrG/i2FG/rCmU*mU*m | |
| | | U*mU | |
| PG g077 | Human.ATP7B.NGG1. | mU*mU*mG*rGrUrGrArCrUrGrCrCrArCrGrCrCrCrA | 181 |
| | Mut1.Hom7.FBS8.mU*mU* | rArGrUrUrUrUrArGrAmGmCmUmAmGmAmAmAm | |
| | mU*mU.ET4F.FBS3F | UmAmGmCrArArGrUrUrArArArArUrArArGrGrCrUr | |
| | | ArGrUrCrCrGrUrUrArUrCmAmAmCmUmUmGmAm | |
| | | AmAmAmAmGmUmGmGmCmAmCmCmGmAmGm | |
| | | UmCmGmGmUmGmCrGrU/i2FG/rArA/i2FC/rArC/ | |
| | | i2FC/rCrC/i2FU/rUrG/i2FG/rGrC/i2FG/rUrG/i2FG/ | |
| | | rCmU*mU*mU*mU | |

¹For RNA, T is U; U are T in the sequence listing. For each entry, the spacer sequence is underlined and the extension arm is bold. The description indicates the length of the FBS and ET or homology region of the extension arm.
²For the sequences: * , phosphorothioate modification; mN, 2′O-methyl modification; rN, unmodified ribonucleotide; i2FN, Int Fluoro modification. N = A, C, T/U, G.

TABLE 8A
EXEMPLARY CAS9 SEQUENCES

| DESCRIPTION | SEQ ID NO: |
|---|---|
| Ssch1Cas9_N583A | 142 |
| Sro1Cas9_N584A | 143 |
| Sha4Cas9_N583A | 144 |
| SsuCas9_N622A | 145 |
| evoCjCas9_H559A | 146 |
| iSpyMac_H840A | 147 |
| Ssi5Cas9_N580A | 148 |
| Ssi8Cas9_N580A | 149 |
| Ssci4Cas9_N580A | 150 |
| Shy1Cas9_N582A | 151 |
| Sag3Cas9_N582A | 152 |
| Slutr1Cas9_N583A | 153 |
| Ssch3Cas9_N583A | 154 |
| SpRYCas9_H840A | 155 |
| SpRYcCas9_H849A | 156 |
| Sma2Cas9_N622A | 157 |
| SsaCas9_N628A | 158 |
| EvoSluCas9_N582A | 159 |
| SluCas9_N582A | 160 |
| EvosRGN3.1_N585A | 161 |
| EvoNme2Cas9_H588A | 162 |
| EvoAnaCas9_H582A | 163 |

TABLE 8B
EXEMPLARY CAS9 SEQUENCES

| | | | SEQ ID |
|---|---|---|---|
| NAME | SPECIES (native or derived) | Length | NO: |
| St1Cas9- | Methanobacterium sp | 1097 | 270 |
| sim3_MetCas9_MBW4258562.1_Methanobacterium-sp- | | | |
| YSL_01 | | | |
| SsaCas9-sim1_ARC34060.1_Streptococcus-equinus | Streptococcus equinus | 1128 | 271 |
| SsaCas9-sim1_SsaCas9_AR00_CCB95040.1_Streptococcus- | Streptococcus salivarius | 1128 | 272 |
| salivarius-JIM8777_01 | | | |
| SsaCas9-sim1_SsaCas9_AR01_ancestral-seq- | Streptococcus salivarius | 1128 | 273 |
| recon_Streptococcus-salivarius_01 | | | |
| SsaCas9-sim1_SsaCas9_AR02_ancestral-seq- | Streptococcus salivarius | 1128 | 274 |
| recon_Streptococcus-salivarius_01 | | | |
| SsaCas9-sim1_WP_003097512.1_Streptococcus-vestibularis | Streptococcus vestibularis | 1128 | 275 |
| SsaCas9-sim1_WP_014634195.1_Streptococcus-salivarius | Streptococcus salivarius | 1127 | 276 |
| SsaCas9-sim1_WP_037611471.1_Streptococcus-sp-SR4 | Streptococcus sp SR4 | 1128 | 277 |
| SsaCas9-sim1_WP_048787825.1_Streptococcus | Streptococcus | 1122 | 278 |
| SsaCas9-sim1_WP_048790568.1_Streptococcus-salivarius | Streptococcus salivarius | 1139 | 279 |
| SsaCas9-sim1_WP_064519118.1_Streptococcus-vestibularis | Streptococcus vestibularis | 1128 | 280 |
| SsaCas9-sim1_WP_145516278.1_Streptococcus-salivarius | Streptococcus salivarius | 1121 | 281 |
| SsaCas9-sim1_WP_227278337.1_Streptococcus-vestibularis | Streptococcus vestibularis | 1122 | 282 |
| SsaCas9-sim2_clustered_ARC34060.1_Streptococcus- | Streptococcus equinus | 1128 | 283 |
| equinus | | | |
| SsaCas9-sim2_clustered_HEM3702072.1_Streptococcus-suis | Streptococcus suis | 1122 | 284 |
| SsaCas9-sim2_clustered_HEM4744366.1_Streptococcus-suis | Streptococcus suis | 1122 | 285 |
| SsaCas9-sim2_clustered_MDU6911040.1_Streptococcus- | Streptococcus salivarius | 1127 | 286 |
| salivarius | | | |
| SsaCas9-sim2_clustered_WP_002299171.1_Streptococcus- | Streptococcus mutans | 1125 | 287 |
| mutans | | | |
| SsaCas9-sim2_clustered_WP_021002704.1_Streptococcus- | Streptococcus intermedius | 1125 | 288 |
| intermedius | | | |
| SsaCas9-sim2_clustered_WP_084910940.1_Streptococcus- | Streptococcus oralis | 1129 | 289 |
| oralis | | | |
| SsaCas9-sim2_clustered_WP_115265868.1_Streptococcus- | Streptococcus macedonicus | 1130 | 290 |
| macedonicus | | | |
| SsaCas9-sim2_clustered_WP_126440388.1_Streptococcus- | Streptococcus equinus | 1130 | 291 |
| equinus | | | |
| SsaCas9-sim2_clustered_WP_155974233.1_Streptococcus- | Streptococcus ruminantium | 1125 | 292 |
| ruminantium | | | |
| SsaCas9-sim2_clustered_WP_198459777.1_Streptococcus- | Streptococcus oralis | 1122 | 293 |
| oralis | | | |
| SsaCas9-sim2_clustered_WP_219967735.1_Streptococcus- | Streptococcus gordonii | 1136 | 294 |
| gordonii | | | |
| SsaCas9-sim2_clustered_WP_223322622.1_Streptococcus- | Streptococcus sanguinis | 1121 | 295 |
| sanguinis | | | |
| SsaCas9-sim2_clustered_WP_257737268.1_Streptococcus- | Streptococcus uberis | 1122 | 296 |
| uberis | | | |
| SsaCas9-sim2_clustered_WP_268734931.1_Streptococcus- | Streptococcus cristatus | 1127 | 297 |
| cristatus | | | |
| SsaCas9-sim2_clustered_WP_270615522.1_Streptococcus- | Streptococcus koreensis | 1123 | 298 |
| koreensis | | | |
| SsaCas9-sim2_clustered_WP_281734300.1_Streptococcus- | Streptococcus lutetiensis | 1123 | 299 |
| lutetiensis | | | |
| SsaCas9-sim2_clustered_WP_311154762.1_uncultured- | Streptococcus sp | 1123 | 300 |
| Streptococcus-sp | | | |
| SsaCas9-sim3_Structure-Ssa-Streptococcus- | Streptococcus cristatus | 1130 | 301 |
| cristatus_A0A3R9LSK4_STRCR_Streptococcus-cristatus_01 | | | |
| SsaCas9-sim3_structure-Ssa-Streptococcus- | Streptococcus massiliensis | 1126 | 302 |
| massiliensis_A0A380KY87_9STRE_Streptococcus- | | | |
| massiliensis_01 | | | |
| SsaCas9-sim3_structure-Ssa-Streptococcus- | Streptococcus vestibularis | 1128 | 303 |
| vestibularis_A0A3S4QG93_Streptococcus-vestibularis_01 | | | |
| SsaCas9-sim3_structure-St1_A0A7X2QGI6_Streptococcus- | Streptococcus uberis | 1122 | 304 |
| uberis_01 | | | |
| SsaCas9-sim3_structure-St1-Enterococcus- | Enterococcus asini | 1123 | 305 |
| asini_A0A413AJC9_9ENTE_Enterococcus-asini_01 | | | |
| SsaCas9-sim3_structure-St1-Enterococcus- | Enterococcus asini | 1123 | 306 |
| asini_MCD5030292.1 | | | |
| SsaCas9-sim3_structure-St1-Enterococcus- | Enterococcus asini | 1123 | 307 |
| asini_RGW10367.1 | | | |
| SsaCas9-sim3_structure-St1-Enterococcus- | Enterococcus asini | 1130 | 308 |
| asini_WP_231453593.1 | | | |
| SsaCas9-sim3_structure-St1-Enterococcus- | Enterococcus asini | 1130 | 309 |
| asini_WP_259305198.1 | | | |
| SsaCas9-sim3_structure-St1-Enterococcus- | Enterococcus asini | 1131 | 310 |
| asini_WP_303220258.1 | | | |
| SsaCas9-sim3_structure-St1-Enterococcus- | Enterococcus asini | 1130 | 311 |
| asini_WP_311832475.1 | | | |
| SsaCas9-sim3_structure-St1-Enterococcus- | Enterococcus asini | 1130 | 312 |
| asini_WP_311835806.1 | | | |
| SsaCas9-sim3_structure-St1-Enterococcus- | Enterococcus asini | 1130 | 313 |
| asini_WP_311877876.1 | | | |
| SsaCas9-sim3_structure-St1-Enterococcus- | Enterococcus asini | 1130 | 314 |
| asini_WP_311896923.1 | | | |

TABLE 9A
EXEMPLARY mRNA SEQUENCES
RELATED TO RT EDITORS

| DESCRIPTION | SEQ ID NO:¹ |
|---|---|
| SegPolyA_1 | 182 |
| SegPolyA_2 | 183 |
| SegPolyA_3 | 184 |
| SegPolyA_4 | 185 |
| 120_PolyA | 186 |
| 130_PolyA | 187 |
| 3′UTR | 188 |
| WPRE | 189 |
| ek5 | 190 |
| STH | 191 |
| STH-2 | 192 |
| 5′UTR | 193 |
| RT editor mRNA sequence | 194 |
| 3′UTR-WPRE-SegPolyA_1 | 195 |
| 3′UTR-WPRE-SegPolyA_2 | 196 |
| 3′UTR-WPRE-SegPolyA_3 | 197 |
| 3′UTR-WPRE-SegPolyA_4 | 198 |
| 3′UTR-WPRE-120_PolyA | 199 |
| 3′UTR-WPRE-130_PolyA | 200 |
| 3′UTR-STH | 201 |
| 3′UTR-eK5-120_PolyA | 202 |
| 3′UTR-eK5-130_PolyA | 203 |
| 3′UTR-eK5-SegPolyA_1 | 204 |
| 3′UTR-eK5-SegPolyA_2 | 205 |
| 3′UTR-eK5-SegPolyA_3 | 206 |
| 3′UTR-eK5-SegPolyA_4 | 207 |
| eK5-120_PolyA | 208 |
| eK5-130_PolyA | 209 |
| eK5-SegPolyA_1 | 210 |
| eK5-SegPolyA_2 | 211 |
| eK5-SegPolyA_3 | 212 |
| eK5-SegPolyA_4 | 213 |
| 3′UTR-STH-120_PolyA | 214 |
| 3′UTR-STH-130_PolyA | 215 |
| 3′UTR-STH-SegPolyA_1 | 216 |
| 3′UTR-STH-SegPolyA_2 | 217 |
| 3′UTR-STH-SegPolyA_3 | 218 |
| 3′UTR-STH-SegPolyA_4 | 219 |
| RT_editor-3′UTR-WPRE-SegPolyA_1 | 220 |
| RT_editor-3′UTR-WPRE-SegPolyA_2 | 221 |
| RT_editor-3′UTR-WPRE-SegPolyA_3 | 222 |
| RT_editor-3′UTR-WPRE-SegPolyA_4 | 223 |
| RT_editor-3′UTR-WPRE-120_PolyA | 224 |
| RT_editor-3′UTR-WPRE-130_PolyA | 225 |
| RT_editor-3′UTR-STH | 226 |
| RT_editor-3′UTR-eK5-120_PolyA | 227 |
| RT_editor-3′UTR-eK5-130_PolyA | 228 |
| RT_editor-3′UTR-eK5-SegPolyA_1 | 229 |
| RT_editor-3′UTR-eK5-SegPolyA_2 | 230 |
| RT_editor-3′UTR-eK5-SegPolyA_3 | 231 |
| RT_editor-3′UTR-eK5-SegPolyA_4 | 232 |
| RT_editor-eK5-120_PolyA | 233 |
| RT_editor-eK5-130_PolyA | 234 |
| RT_editor-eK5-SegPolyA_1 | 235 |
| RT_editor-eK5-SegPolyA_2 | 236 |
| RT_editor-eK5-SegPolyA_3 | 237 |
| RT_editor-eK5-SegPolyA_4 | 238 |
| RT_editor-3′UTR-STH-120_PolyA | 239 |
| RT_editor-3′UTR-STH-130_PolyA | 240 |
| RT_editor-3′UTR-STH-SegPolyA_1 | 241 |
| RT_editor-3′UTR-STH-SegPolyA_2 | 242 |
| RT_editor-3′UTR-STH-SegPolyA_3 | 243 |
| RT_editor-3′UTR-STH-SegPolyA_4 | 244 |
| Comp14 transcript | 245 |
| Full-length segment from human | 246 |
| MALAT1 (HTH) | |

¹For RNA, T is U; U are T in the sequence listing.

TABLE 9B
EXEMPLARY mRNA Elements

| | | | SEQ |
|---|---|---|---|
| | Element | | ID |
| Name | Position | Sequence | NO: |
| SAA1 | 5UTR | AGGGACCCGCAGCTCAGCTACAGCACAGATCAGCACC | 940 |
| APOC3 | 5UTR | CTGCTCAGTTCATCCCTAGAGGCAGCTGCTCCAGGAACAGAGGT | 941 |
| | | GCC | |
| ALB | 5UTR | CTAGCTTTTCTCTTCTGTCAACCCCACACGCCTTTGGCACA | 942 |
| HP | 5UTR | ACTGGAAAAGATAGTGACCTTACCAGGGCCAAAGTTTGTAGAC | 943 |
| | | ACAGGAATTACGAAATGGAGAAGGGGGAGAAGTGAGCTAGTGG | |
| | | CAGCATAAAAAGACCAGCAGATGCCCCACAGCACTGCTCTTCCA | |
| | | GAGGCAAGACCAACCAAG | |
| ORM1 | 5UTR | AGCACTGCCTGGCTCCACGTGCCTCCTGGTCTCAGT | 944 |
| APOA2 | 5UTR | AGGCACAGACACCAAGGACAGAGACGCTGGCTAGGCCGCCCTC | 945 |
| | | CCCACTGTTACCAAC | |
| SAA2 | 5UTR | ACTATAAATAGCAGCCACCTCTCCCTGGCAGACAGGGACCCGCA | 946 |
| | | GCTCAGCTACAGCACAGATCAGCACC | |
| SERPINA1 | 5UTR | CTCCTCAGCTTCAGGCACCACCACTGACCTGGGACAGTGAATCG | 947 |
| | | ACA | |
| APOC1 | 5UTR | AGGCGGTCAGGGGAAGGCTCAGGAGGAGGGAGATCAACATCAA | 948 |
| | | CCTGCCCCGCCCCCTCCCCAGCCTGATAAAGGTCCTGCGGGCAG | |
| | | GACAGGACCTCCCAACCAAGCCCTCCAGCAAGGATTCAGAGTG | |
| | | CCCCTCCGGCCTCGCC | |
| Apt17_custom | 5UTR | ACTCACTATTTGTTTTCGCGCCCAGTTGCAAAAAGTGTCG | 949 |
| custom | 5UTR | AGGATAATATACTTACATACTTACTAATTAATACTAAACTCAAC | 950 |
| | | GCCACC | |
| Syn_5′UTR | 5UTR | AGGAAATAAGAGAGAAAAGAAGAGTAAGAAGAAATATAAGAG | 1075 |
| | | CCACC | |
| SAA1 | 3UTR | GCTTCCTCTTCACTCTGCTCTCAGGAGATCTGGCTGTGAGGCCCT | 951 |
| | | CAGGGCAGGGATACAAAGCGGGGAGAGGGTACACAATGGGTAT | |
| | | CTAATAAATACTTAAGAGGTGGAA | |
| APOC3 | 3UTR | GACCTCAATACCCCAAGTCCACCTGCCTATCCATCCTGCGAGCT | 952 |
| | | CCTTGGGTCCTGCAATCTCCAGGGCTGCCCCTGTAGGTTGCTTA | |
| | | AAAGGGACAGTATTCTCAGTGCTCTCCTACCCCACCTCATGCCT | |
| | | GGCCCCCCTCCAGGCATGCTGGCCTCCCAATAAAGCTGGACAAG | |
| | | AAGCTGCTATGA | |
| ALB | 3UTR | CATCACATTTAAAAGCATCTCAGCCTACCATGAGAATAAGAGAA | 953 |
| | | AGAAAATGAAGATCAAAAGCTTATTCATCTGTTTTTCTTTTTCGT | |
| | | TGGTGTAAAGCCAACACCCTGTCTAAAAAACATAAATTTCTTTA | |
| | | ATCATTTTGCCTCTTTTCTCTGTGCTTCAATTAATAAAAAATGGA | |
| | | AAGAATCTAATAGAGTGGTACAGCACTGTTATTTTTCAAAGATG | |
| | | TGTTGCTATCCTGAAAATTCTGTAGGTTCTGTGGAAGTTCCAGTG | |
| | | TTCTCTCTTATTCCACTTCGGTAGAGGATTTCTAGTTTCTTGTGG | |
| | | GCTAATTAAATAAATCATTAATACTCTTCTAAGTTATGGATTATA | |
| | | AACATTCAAAATAATATTTTGACATTATGATAATTCTGAATAAA | |
| | | AGAACAAAAACCA | |
| HP | 3UTR | TGCAAGGCTGGCCGGAAGCCCTTGCCTGAAAGCAAGATTTCAGC | 954 |
| | | CTGGAAGAGGGCAAAGTGGACGGGAGTGGACAGGAGTGGATGC | |
| | | GATAAGATGTGGTTTGAAGCTGATGGGTGCCAGCCCTGCATTGC | |
| | | TGAGTCAATCAATAAAGAGCTTTCTTTTGACCCA | |
| ORM1 | 3UTR | CAGGACACAGCCTTGGATCAGGACAGAGACTTGGGGGCCATCC | 955 |
| | | TGCCCCTCCAACCCGACATGTGTACCTCAGCTTTTTCCCTCACTT | |
| | | GCATCAATAAAGCTTCTGTGTTTGGAACAGCTAA | |
| APOA2 | 3UTR | AGTGTCCAGACCATTGTCTTCCAACCCCAGCTGGCCTCTAGAAC | 956 |
| | | ACCCACTGGCCAGTCCTAGAGCTCCTGTCCCTACCCACTCTTTGC | |
| | | TACAATAAATGCTGAATGAATCCA | |
| SAA2 | 3UTR | GCTTCCTCTTCACTCTGCTCTCAGGAGACCTGGCTATGAGGCCCT | 957 |
| | | CGGGGCAGGGATACAAAGTTAGTGAGGTCTATGTCCAGAGAAG | |
| | | CTGAGATATGGCATATAATAGGCATCTAATAAATGCTTAAGAGG | |
| | | TGGAA | |
| SERPINA1 | 3UTR | CTGCCTCTCGCTCCTCAACCCCTCCCCTCCATCCCTGGCCCCCTC | 958 |
| | | CCTGGATGACATTAAAGAAGGGTTGAGCTGGTCCCTGCCTGCAT | |
| | | GTGACTGTAAATCCCTCCCATGTTTTCTCTGAGTCTCCCTTTGCC | |
| | | TGCTGAGGCTGTATGTGGGCTCCAGGTAACAGTGCTGTCTTCGG | |
| | | GCCCCCTGAACTGTGTTCATGGAGCATCTGGCTGGGTAGGCACA | |
| | | TGCTGGGCTTGAATCCAGGGGGGACTGAATCCTCAGCTTACGGA | |
| | | CCTGGGCCCATCTGTTTCTGGAGGGCTCCAGTCTTCCTTGTCCTG | |
| | | TCTTGGAGTCCCCAAGAAGGAATCACAGGGGAGGAACCAGATA | |
| | | CCAGCCATGACCCCAGGCTCCACCAAGCATCTTCATGTCCCCCT | |
| | | GCTCATCCCCCACTCCCCCCCACCCAGAGTTGCTCATCCTGCCA | |
| | | GGGCTGGCTGTGCCCACCCCAAGGCTGCCCTCCTGGGGGCCCCA | |
| | | GAACTGCCTGATCGTGCCGTGGCCCAGTTTTGTGGCATCTGCAG | |
| | | CAACACAAGAGAGAGGACAATGTCCTCCTCTTGACCCGCTGTCA | |
| | | CCTAACCAGACTCGGGCCCTGCACCTCTCAGGCACTTCTGGAAA | |
| | | ATGACTGAGGCAGATTCTTCCTGAAGCCCATTCTCCATGGGGCA | |
| | | ACAAGGACACCTATTCTGTCCTTGTCCTTCCATCGCTGCCCCAGA | |
| | | AAGCCTCACATATCTCCGTTTAGAATCAGGTCCCTTCTCCCCAG | |
| | | ATGAAGAGGAGGGTCTCTGCTTTGTTTTCTCTATCTCCTCCTCAG | |
| | | ACTTGACCAGGCCCAGCAGGCCCCAGAAGACCATTACCCTATAT | |
| | | CCCTTCTCCTCCCTAGTCACATGGCCATAGGCCTGCTGATGGCTC | |
| | | AGGAAGGCCATTGCAAGGACTCCTCAGCTATGGGAGAGGAAGC | |
| | | ACATCACCCATTGACCCCCGCAACCCCTCCCTTTCCTCCTCTGAG | |
| | | TCCCGACTGGGGCCACATGCAGCCTGACTTCTTTGTGCCTGTTGC | |
| | | TGTCCCTGCAGTCTTCAGAGGGCCACCGCAGCTCCAGTGCCACG | |
| | | GCAGGAGGCTGTTCCTGAATAGCCCCTGTGGTAAGGGCCAGGA | |
| | | GAGTCCTTCCATCCTCCAAGGCCCTGCTAAAGGACACAGCAGCC | |
| | | AGGAAGTCCCCTGGGCCCCTAGCTGAAGGACAGCCTGCTCCCTC | |
| | | CGTCTCTACCAGGAATGGCCTTGTCCTATGGAAGGCACTGCCCC | |
| | | ATCCCAAACTAATCTAGGAATCACTGTCTAACCACTCACTGTCA | |
| | | TGAATGTGTACTTAAAGGATGAGGTTGAGTCATACCAAATAGTG | |
| | | ATTTCGATAGTTCAAAATGGTGAAATTAGCAATTCTACATGATT | |
| | | CAGTCTAATCAATGGATACCGACTGTTTCCCACACAAGTCTCCT | |
| | | GTTCTCTTAAGCTTACTCACTGACAGCCTTTCACTCTCCACAAAT | |
| | | ACATTAAAGATATGGCCATCACCAAGCCCCCTAGGATGACACCA | |
| | | GACCTGAGAGTCTGAAGACCTGGATCCAAGTTCTGACTTTTCCC | |
| | | CCTGACAGCTGTGTGACCTTCGTGAAGTCGCCAAACCTCTCTGA | |
| | | GCCCCAGTCATTGCTAGTAAGACCTGCCTTTGAGTTGGTATGAT | |
| | | GTTCAAGTTAGATAACAAAATGTTTATACCCATTAGAACAGAGA | |
| | | ATAAATAGAACTACATTTCTTGCA | |
| APOC1 | 3UTR | GGACCTGAAGGGTGACATCCCAGGAGGGGCCTCTGAAATTTCCC | 959 |
| | | ACACCCCAGCGCCTGTGCTGAGGACTCCCTCCATGTGGCCCCAG | |
| | | GTGCCACCAATAAAAATCCTACAGAAAA | |
| 3WJ1_custom | 3UTR | TTGCCATGTGTATGTGGGTTTTTTTTTTCCCACATACTCTGATGA | 960 |
| | | TCCTTTTTTTTTTGGATCATTCATGGCAA | |
| 3WJ2_custom | 3UTR | TTGCCATGTGTATGTGGGAAAAAAAAAACCCACATACTCTGATG | 961 |
| | | ATCCAAAAAAAAAAGGATCATTCATGGCAA | |
| HBB | 3UTR | gtgctggtctgtgtgctggcccatcactttggcaaagaattcaccccaccagtgcaggctgcctatcagaaa | 1076 |
| Extended | | gtggtggctggtgtggctaatgccctggcccacaagtatcactaagctcgctttcttgctgtccaatttctatta | |
| | | aaggttcctttgttccctaagtccaactactaaactgggggatattatgaagggccttgagcatctggattctg | |
| | | cctaataaaaaacatttattttcattgca | |
| hHBA | 3UTR | GCTGGAGCCTCGGTGGCCATGCTTCTTGCCCCTTGGGCCTCCCCC | 1077 |
| | | CAGCCCCTCCTCCCCTTCCTGCACCCGTACCCCCGTGGTCTTTGA | |
| | | ATAAAGTCTGAGTGGGCGGC | |
| mHBA | 3UTR | GCGGCCGCTTAATTAAGCTGCCTTCTGCGGGGCTTGCCTTCTGG | 1078 |
| | | CCATGCCCTTCTTCTCTCCCTTGCACCTGTACCTCTTGGTCTTTGA | |
| | | ATAAAGCCTGAGTAGGAAGTCTAG | |
| HBB_extended | 3UTR | GTGCTGGTCTGTGTGCTGGCCCATCACTTTGGCAAAGAATTCAC | 1079 |
| (HBBext) | | CCCACCAGTGCAGGCTGCCTATCAGAAAGTGGTGGCTGGTGTGG | |
| | | CTAATGCCCTGGCCCACAAGTATCACTAAGCTCGCTTTCTTGCTG | |
| | | TCCAATTTCTATTAAAGGTTCCTTTGTTCCCTAAGTCCAACTACT | |
| | | AAACTGGGGGATATTATGAAGGGCCTTGAGCATCTGGATTCTGC | |
| | | CTAATAAAAAACATTTATTTTCATTGCA | |
| AES-mtRNR1 | 3UTR | CTGGTACTGCATGCACGCAATGCTAGCTGCCCCTTTCCCGTCCTG | 1080 |
| | | GGTACCCCGAGTCTCCCCCGACCTCGGGTCCCAGGTATGCTCCC | |
| | | ACCTCCACCTGCCCCACTCACCACCTCTGCTAGTTCCAGACACCT | |
| | | CCCAAGCACGCAGCAATGCAGCTCAAAACGCTTAGCCTAGCCA | |
| | | CACCCCCACGGGAAACAGCAGTGATTAACCTTTAGCAATAAAC | |
| | | GAAAGTTTAACTAAGCTATACTAACCCCAGGGTTGGTCAATTTC | |
| | | GTGCCAGCCACACC | |
| EK5 | AE¹ | cactcctccatggtgatataaagaccacccacttccttcgggtgagcccctaagccatggttgtactgcacta | 962 |
| | | tcatcctaagacggtccttcttcggatcgcaatctcaccctggtgccgcgcttccttegggaactgcacccg | |
| | | cggaccagggccgtctttgaacttttctaactgttcttac | |
| STH | AE¹ | GTCATGAAGGTTTTTCTTTTCCTGAGAAAACAAgaaaTTGTTTTCT | 963 |
| | | CAGGTTTTGCTTTTTGAAAAAAAAGCAAAA | |

¹AE (additional elements) can be attached either downstream of the 3′-UTR or the poly A tail

[0242] Table 9C below additionally discloses 5′-UTR sequence variants wherein the difference in sequences are not within the UTR itself but in the second codon, as shown in the fourth column. For CESvar1, CESvar2, and CESvar3, ‘gcc’ was inserted in the second codon position. Column 4 shows the sequence of the first three codons.

TABLE 9C
EXEMPLARY mRNA Elements

| | Element | | First 3 | SEQ ID |
|---|---|---|---|---|
| Name | Position | Sequence of UTR | codons | NO |
| CES1 | 5UTR | agACAGAGACCTCGCAGGCCCCGAGAACTGTCGCCCT | ATGgccAAA | 1081 |
| var1 | | TCCACG | | |
| CES1 | 5UTR | agacagagacctcgcaggccccgagaactgtcgcccttcc | ATGgccAAA | 1082 |
| var2 | | acc | | |
| CES1 | 5UTR | agacagagacctcgcaggccccgagaactgtcgccctgcc | ATGgccAAA | 1083 |
| var3 | | acc | | |
| CES1 | 5UTR | AGACAGAGACCTCGCAGGCCCCGAGAACTGTCGCCC | ATG---AAA | 1084 |
| var4 | | TTCCACG | | |

[0243] Presented in Table 10 below are mRNA sequences of the components of exemplary RT editors comprising variant 3′UTR sequences. The components are listed from left-to-right in the 5′ to 3′ direction, using SEQ TD NOs to denote the sequence.

TABLE 10
EXEMPLARY 3′UTR VARIANTS

| | | | 3′UTR | 3′UTR | Structure | |
|---|---|---|---|---|---|---|
| | 5′ UTR | RT EDITOR | element#1 | element#2 | motif | Poly A |
| DESCRIPTION | SEQ ID NO: | SEQ ID NO: | SEQ ID NO: | SEQ ID NO: | SEQ ID NO: | SEQ ID NO: |
| RT_editor-3′UTR- | 193 | 194 | 188 | 189 | | 182 |
| WPRE- | | | | | | |
| SegPolyA_1 | | | | | | |
| (SEQ ID NO: 220) | | | | | | |
| RT_editor-3′UTR- | 193 | 194 | 188 | 189 | | 183 |
| WPRE- | | | | | | |
| SegPolyA_2 | | | | | | |
| (SEQ ID NO: 221) | | | | | | |
| RT editor-3′UTR- | 193 | 194 | 188 | 189 | | 184 |
| WPRE- | | | | | | |
| SegPolyA_3 | | | | | | |
| (SEQ ID NO: 222) | | | | | | |
| RT_editor-3′UTR- | 193 | 194 | 188 | 189 | | 185 |
| WPRE- | | | | | | |
| SegPolyA_4 | | | | | | |
| (SEQ ID NO: 223) | | | | | | |
| RT editor-3′UTR- | 193 | 194 | 188 | 189 | | 186 |
| WPRE- | | | | | | |
| 120_PolyA | | | | | | |
| (SEQ ID NO: 224) | | | | | | |
| RT editor-3′UTR- | 193 | 194 | 188 | 189 | | 187 |
| WPRE- | | | | | | |
| 130_Poly A | | | | | | |
| (SEQ ID NO: 225) | | | | | | |
| RT editor-3′UTR- | 193 | 194 | 188 | | 191 | |
| STH | | | | | | |
| (SEQ ID NO: 226) | | | | | | |
| RT_editor-3′UTR- | 193 | 194 | 188 | 190 | | 186 |
| eK5-120_PolyA | | | | | | |
| (SEQ ID NO: 227) | | | | | | |
| RT editor-3′UTR- | 193 | 194 | 188 | 190 | | 187 |
| eK5-130_PolyA | | | | | | |
| (SEQ ID NO: 228) | | | | | | |
| RT editor-3′UTR- | 193 | 194 | 188 | 190 | | 182 |
| eK5-SegPolyA_1 | | | | | | |
| (SEQ ID NO: 229) | | | | | | |
| RT editor-3′UTR- | 193 | 194 | 188 | 190 | | 183 |
| eK5-SegPolyA_2 | | | | | | |
| (SEQ ID NO: 230) | | | | | | |
| RT editor-3′UTR- | 193 | 194 | 188 | 190 | | 184 |
| eK5-SegPolyA_3 | | | | | | |
| (SEQ ID NO: 231) | | | | | | |
| RT editor-3′UTR- | 193 | 194 | 188 | 190 | | 185 |
| eK5-SegPolyA_4 | | | | | | |
| (SEQ ID NO: 232) | | | | | | |
| RT editor-eK5- | 193 | 194 | 190 | | | 186 |
| 120_Poly A | | | | | | |
| (SEQ ID NO: 233) | | | | | | |
| RT editor-eK5- | 193 | 194 | 190 | | | 187 |
| 130_Poly A | | | | | | |
| (SEQ ID NO: 234) | | | | | | |
| RT editor-eK5- | 193 | 194 | 190 | | | 182 |
| SegPoly A_1 | | | | | | |
| (SEQ ID NO: 235) | | | | | | |
| RT editor-eK5- | 193 | 194 | 190 | | | 183 |
| SegPolyA_2 | | | | | | |
| (SEQ ID NO: 236) | | | | | | |
| RT editor-eK5- | 193 | 194 | 190 | | | 184 |
| SegPolyA_3 | | | | | | |
| (SEQ ID NO: 237) | | | | | | |
| RT editor-eK5- | 193 | 194 | 190 | | | 185 |
| SegPolyA_4 | | | | | | |
| (SEQ ID NO: 238) | | | | | | |
| RT_editor-3′UTR- | 193 | 194 | 188 | | 192 | 186 |
| STH-120_PolyA | | | | | | |
| (SEQ ID NO: 239) | | | | | | |
| RT_editor-3′UTR- | 193 | 194 | 188 | | 192 | 187 |
| STH-130_PolyA | | | | | | |
| (SEQ ID NO: 240) | | | | | | |
| RT editor-3′UTR- | 193 | 194 | 188 | | 192 | 182 |
| STH-SegPolyA_1 | | | | | | |
| (SEQ ID NO: 241) | | | | | | |
| RT editor-3′UTR- | 193 | 194 | 188 | | 192 | 183 |
| STH-SegPolyA_2 | | | | | | |
| (SEQ ID NO: 242) | | | | | | |
| RT_editor-3′UTR- | 193 | 194 | 188 | | 192 | 184 |
| STH-SegPolyA_3 | | | | | | |
| (SEQ ID NO: 243) | | | | | | |
| RT editor-3′UTR- | 193 | 194 | 188 | | 192 | 185 |
| STH-SegPolyA_4 | | | | | | |
| (SEQ ID NO: 244) | | | | | | |

TABLE 11
EXEMPLARY REVERSE TRANSCRIPTASE VARIANTS

| NAME | SPECIES (native or derived) | Length | SEQ ID NO: |
|---|---|---|---|
| RT_RTBat-A_ARS01_RTEni-V-derived | Eptesicus nilssonii, bat | 672 | 250 |
| RT_RTBat-A_ARS01_With-RT5m_Prot-neg2 | Eptesicus nilssonii, bat | 668 | 251 |
| RT_RTEni_With-RT5m_Eptesicus- | Eptesicus nilssonii, bat | 679 | 252 |
| nilssonii | | | |
| RT_RTEni_With-RT5m_Eptesicus- | Eptesicus nilssonii, bat | 672 | 253 |
| nilssonii_within-prot | | | |
| RT_RTEni_With-RT5m_Eptesicus- | Eptesicus nilssonii, bat | 668 | 315 |
| nilssonii_Prot-neg2 | | | |
| RT_RTMbr-A_Myotis-brandtii | Myotis brandtii, bat | 673 | 254 |
| RT_RTMbr-A_Myotis-brandtii_With- | Myotis brandtii, bat | 669 | 255 |
| RT5m_Prot-neg2 | | | |
| RT_RTMcr-A | Melozone crissalis, bird | 741 | 256 |
| RT_RTMcr-A_Prot-neg2 | Melozone crissalis, bird | 675 | 257 |
| RT_RTMcr-A_Melozone-crissalis_Prot- | Melozone crissalis, bird | 675 | 316 |
| neg2_With-RT5m | | | |
| RT_RTMda-A | Myotis daubertonii, bat | 673 | 258 |
| RT_RTMda-A_Myotis-daubentonii_With- | Myotis daubentonii, bat | 669 | 259 |
| RT5m_Prot-neg2 | | | |
| RT_RTMge_With-RT5m | Melospiza georgiana, bird | 685 | 141 |
| RT_RTMge_Melospiza-georgiana_With- | Melospiza georgiana, bird | 675 | 260 |
| RT5m_Prot-neg2 | | | |
| RT_RTMge-A | Melospiza georgiana, bird | 713 | 261 |
| RT_RTMge-A_Prot-neg2 | Melospiza georgiana, bird | 671 | 262 |
| RT_RTMge-A_Prot-neg2_With-RT5m | Melospiza georgiana, bird | 671 | 317 |
| RT_RTMge-B | Melospiza georgiana, bird | 741 | 263 |
| RT_RTMge-C_var-of-B_Prot-neg2 | Melospiza georgiana, bird | 675 | 264 |
| RT_RTMge-C_var-of-B_With- | Melospiza georgiana, bird | 675 | 318 |
| RT5m_Prot-neg2 | | | |
| RT_RTMge-C_var-of-B_Within-prot- | Melospiza georgiana, bird | 679 | 265 |
| cleavage | | | |
| RT_RTPku-A_Pipistrellus-kuhlii | Pipistrellus kuhlii, bat | 673 | 266 |
| RT_RTPku-A_Pipistrellus-kuhlii_With- | Pipistrellus kuhlii, bat | 669 | 267 |
| RT5m_Prot-neg2 | | | |
| RT_RTZal-A | Zonotrichia albicollis, bird | 741 | 268 |
| RT_RTZal-A_Prot-neg2 | Zonotrichia albicollis, bird | 675 | 269 |
| RT_RTZal-A_Zonotrichia-albicollis_Prot- | Zonotrichia albicollis, bird | 675 | 319 |
| neg2_With-RT5m | | | |
| Klebsiella pneumonia mut¹ | Klebsiella pneumonia (added | 425 | 899 |
| | mutations E48K, S339K, | | |
| | Y395E) | | |
| Burkholderia cepacia mut¹ | Burkholderia cepacia (added | 423 | 900 |
| | mutations T47K, S87E, S338K, | | |
| | Y394E) | | |
| Caldibacillus thermoamylovorans | Caldibacillus | 442 | 901 |
| | thermoamylovorans | | |
| Caldibacillus thermoamylovorans mut¹ | Caldibacillus | 442 | 902 |
| | thermoamylovorans (added | | |
| | mutations T53K, S357K, | | |
| | Y408E) | | |
| Lysinibacillus sphaericus | Lysinibacillus sphaericus | 459 | 903 |
| Lysinibacillus sphaericus mut¹ | Lysinibacillus sphaericus | 459 | 904 |
| | (added mutations E63K, | | |
| | S374K, Y425E) | | |
| Bacillus sp. | Bacillus sp. | 438 | 905 |
| Bacillus sp. mut¹ | Bacillus sp. (added mutations | 1438 | 906 |
| | S339I, S351K, Y402E) | | |
| Truncated RT from Myotis brandtii | Myotis brandtii | 492 | 907 |
| Truncated RT from Pipistrellus kuhlii | Pipistrellus kuhlii | 492 | 908 |
| Truncated RT from MMLV | MMLV | 492 | 909 |
| pPG273_MMLV_protneg_RT | | 667 | 1015 |
| PG270_Woolly_monkey_RT | | 672 | 1016 |
| PG273_Melospiza_consensus_protneg_RT | | 675 | 1017 |
| PG273_Avian_protneg_RT | | 694 | 1018 |

TABLE 12A
EXEMPLARY tagRNA SEQUENCES FOR EDITING PAH

| NAME | SEQUENCE¹ | SEQ ID NO: |
|---|---|---|
| hPAH_NGG1_F15E6_ | UAGCGAACUGAGAAGGGCCAGUUUUAGAGCUAGAAAUAGCAAG | 320 |
| TtoC | UUAAAAUAAGGCUAGUCCGUUAUCAACUUGAAAAAGUGGCACCG | |
| | AGUCGGUGCCCUCGGCCCUUCUCAGUUCGC | |
| hPAH_NGG1_F14E6_ | UAGCGAACUGAGAAGGGCCAGUUUUAGAGCUAGAAAUAGCAAG | 321 |
| TtoC | UUAAAAUAAGGCUAGUCCGUUAUCAACUUGAAAAAGUGGCACCG | |
| | AGUCGGUGCCCUCGGCCCUUCUCAGUUCG | |
| hPAH_NGG1_F13E6_ | UAGCGAACUGAGAAGGGCCAGUUUUAGAGCUAGAAAUAGCAAG | 322 |
| TtoC | UUAAAAUAAGGCUAGUCCGUUAUCAACUUGAAAAAGUGGCACCG | |
| | AGUCGGUGCCCUCGGCCCUUCUCAGUUC | |
| hPAH_NGG1_F12E6_ | UAGCGAACUGAGAAGGGCCAGUUUUAGAGCUAGAAAUAGCAAG | 323 |
| TtoC | UUAAAAUAAGGCUAGUCCGUUAUCAACUUGAAAAAGUGGCACCG | |
| | AGUCGGUGCCCUCGGCCCUUCUCAGUU | |
| hPAH_NGG1_F11E6_ | UAGCGAACUGAGAAGGGCCAGUUUUAGAGCUAGAAAUAGCAAG | 324 |
| TtoC | UUAAAAUAAGGCUAGUCCGUUAUCAACUUGAAAAAGUGGCACCG | |
| | AGUCGGUGCCCUCGGCCCUUCUCAGU | |
| hPAH_NGG1_F10E6_ | UAGCGAACUGAGAAGGGCCAGUUUUAGAGCUAGAAAUAGCAAG | 325 |
| TtoC | UUAAAAUAAGGCUAGUCCGUUAUCAACUUGAAAAAGUGGCACCG | |
| | AGUCGGUGCCCUCGGCCCUUCUCAG | |
| hPAH_NGG1_F9E6_ | UAGCGAACUGAGAAGGGCCAGUUUUAGAGCUAGAAAUAGCAAG | 326 |
| TtoC | UUAAAAUAAGGCUAGUCCGUUAUCAACUUGAAAAAGUGGCACCG | |
| | AGUCGGUGCCCUCGGCCCUUCUCA | |
| hPAH_NGG1_F8E6_ | UAGCGAACUGAGAAGGGCCAGUUUUAGAGCUAGAAAUAGCAAG | 327 |
| TtoC | UUAAAAUAAGGCUAGUCCGUUAUCAACUUGAAAAAGUGGCACCG | |
| | AGUCGGUGCCCUCGGCCCUUCUC | |
| hPAH_NGG1_F7E6_ | UAGCGAACUGAGAAGGGCCAGUUUUAGAGCUAGAAAUAGCAAG | 328 |
| TtoC | UUAAAAUAAGGCUAGUCCGUUAUCAACUUGAAAAAGUGGCACCG | |
| | AGUCGGUGCCCUCGGCCCUUCU | |
| hPAH_NGG1_F15E8_ | UAGCGAACUGAGAAGGGCCAGUUUUAGAGCUAGAAAUAGCAAG | 329 |
| TtoC | UUAAAAUAAGGCUAGUCCGUUAUCAACUUGAAAAAGUGGCACCG | |
| | AGUCGGUGCUACCUCGGCCCUUCUCAGUUCGC | |
| hPAH_NGG1_F14E8_ | UAGCGAACUGAGAAGGGCCAGUUUUAGAGCUAGAAAUAGCAAG | 330 |
| TtoC | UUAAAAUAAGGCUAGUCCGUUAUCAACUUGAAAAAGUGGCACCG | |
| | AGUCGGUGCUACCUCGGCCCUUCUCAGUUCG | |
| hPAH_NGG1_F13E8_ | UAGCGAACUGAGAAGGGCCAGUUUUAGAGCUAGAAAUAGCAAG | 331 |
| TtoC | UUAAAAUAAGGCUAGUCCGUUAUCAACUUGAAAAAGUGGCACCG | |
| | AGUCGGUGCUACCUCGGCCCUUCUCAGUUC | |
| hPAH_NGG1_F12E8_ | UAGCGAACUGAGAAGGGCCAGUUUUAGAGCUAGAAAUAGCAAG | 332 |
| TtoC | UUAAAAUAAGGCUAGUCCGUUAUCAACUUGAAAAAGUGGCACCG | |
| | AGUCGGUGCUACCUCGGCCCUUCUCAGUU | |
| hPAH_NGG1_F11E8_ | UAGCGAACUGAGAAGGGCCAGUUUUAGAGCUAGAAAUAGCAAG | 333 |
| TtoC | UUAAAAUAAGGCUAGUCCGUUAUCAACUUGAAAAAGUGGCACCG | |
| | AGUCGGUGCUACCUCGGCCCUUCUCAGU | |
| hPAH_NGG1_F10E8_ | UAGCGAACUGAGAAGGGCCAGUUUUAGAGCUAGAAAUAGCAAG | 334 |
| TtoC | UUAAAAUAAGGCUAGUCCGUUAUCAACUUGAAAAAGUGGCACCG | |
| | AGUCGGUGCUACCUCGGCCCUUCUCAG | |
| hPAH_NGG1_F9E8_ | UAGCGAACUGAGAAGGGCCAGUUUUAGAGCUAGAAAUAGCAAG | 335 |
| TtoC | UUAAAAUAAGGCUAGUCCGUUAUCAACUUGAAAAAGUGGCACCG | |
| | AGUCGGUGCUACCUCGGCCCUUCUCA | |
| hPAH_NGG1_F8E8_ | UAGCGAACUGAGAAGGGCCAGUUUUAGAGCUAGAAAUAGCAAG | 336 |
| TtoC | UUAAAAUAAGGCUAGUCCGUUAUCAACUUGAAAAAGUGGCACCG | |
| | AGUCGGUGCUACCUCGGCCCUUCUC | |
| hPAH_NGG1_F7E8_ | UAGCGAACUGAGAAGGGCCAGUUUUAGAGCUAGAAAUAGCAAG | 337 |
| TtoC | UUAAAAUAAGGCUAGUCCGUUAUCAACUUGAAAAAGUGGCACCG | |
| | AGUCGGUGCUACCUCGGCCCUUCU | |
| hPAH_NGG1_F15E10_ | UAGCGAACUGAGAAGGGCCAGUUUUAGAGCUAGAAAUAGCAAG | 338 |
| TtoC | UUAAAAUAAGGCUAGUCCGUUAUCAACUUGAAAAAGUGGCACCG | |
| | AGUCGGUGCAAUACCUCGGCCCUUCUCAGUUCGC | |
| hPAH_NGG1_F14E10_ | UAGCGAACUGAGAAGGGCCAGUUUUAGAGCUAGAAAUAGCAAG | 339 |
| TtoC | UUAAAAUAAGGCUAGUCCGUUAUCAACUUGAAAAAGUGGCACCG | |
| | AGUCGGUGCAAUACCUCGGCCCUUCUCAGUUCG | |
| hPAH_NGG1_F13E10_ | UAGCGAACUGAGAAGGGCCAGUUUUAGAGCUAGAAAUAGCAAG | 340 |
| TtoC | UUAAAAUAAGGCUAGUCCGUUAUCAACUUGAAAAAGUGGCACCG | |
| | AGUCGGUGCAAUACCUCGGCCCUUCUCAGUUC | |
| hPAH_NGG1_F12E10_ | UAGCGAACUGAGAAGGGCCAGUUUUAGAGCUAGAAAUAGCAAG | 341 |
| TtoC | UUAAAAUAAGGCUAGUCCGUUAUCAACUUGAAAAAGUGGCACCG | |
| | AGUCGGUGCAAUACCUCGGCCCUUCUCAGUU | |
| hPAH_NGG1_F11E10_ | UAGCGAACUGAGAAGGGCCAGUUUUAGAGCUAGAAAUAGCAAG | 342 |
| TtoC | UUAAAAUAAGGCUAGUCCGUUAUCAACUUGAAAAAGUGGCACCG | |
| | AGUCGGUGCAAUACCUCGGCCCUUCUCAGU | |
| hPAH_NGG1_F10E10_ | UAGCGAACUGAGAAGGGCCAGUUUUAGAGCUAGAAAUAGCAAG | 343 |
| TtoC | UUAAAAUAAGGCUAGUCCGUUAUCAACUUGAAAAAGUGGCACCG | |
| | AGUCGGUGCAAUACCUCGGCCCUUCUCAG | |
| hPAH_NGG1_F9E10 | UAGCGAACUGAGAAGGGCCAGUUUUAGAGCUAGAAAUAGCAAG | 344 |
| TtoC | UUAAAAUAAGGCUAGUCCGUUAUCAACUUGAAAAAGUGGCACCG | |
| | AGUCGGUGCAAUACCUCGGCCCUUCUCA | |
| hPAH_NGG1_F8E10_ | UAGCGAACUGAGAAGGGCCAGUUUUAGAGCUAGAAAUAGCAAG | 345 |
| TtoC | UUAAAAUAAGGCUAGUCCGUUAUCAACUUGAAAAAGUGGCACCG | |
| | AGUCGGUGCAAUACCUCGGCCCUUCUC | |
| hPAH_NGG1_F7E10_ | UAGCGAACUGAGAAGGGCCAGUUUUAGAGCUAGAAAUAGCAAG | 346 |
| TtoC | UUAAAAUAAGGCUAGUCCGUUAUCAACUUGAAAAAGUGGCACCG | |
| | AGUCGGUGCAAUACCUCGGCCCUUCU | |
| hPAH_NGG1_F14E12_ | UAGCGAACUGAGAAGGGCCAGUUUUAGAGCUAGAAAUAGCAAG | 347 |
| TtoC | UUAAAAUAAGGCUAGUCCGUUAUCAACUUGAAAAAGUGGCACCG | |
| | AGUCGGUGCACAAUACCUCGGCCCUUCUCAGUUCG | |
| hPAH_NGG1_F13E12_ | UAGCGAACUGAGAAGGGCCAGUUUUAGAGCUAGAAAUAGCAAG | 348 |
| TtoC | UUAAAAUAAGGCUAGUCCGUUAUCAACUUGAAAAAGUGGCACCG | |
| | AGUCGGUGCACAAUACCUCGGCCCUUCUCAGUUC | |
| hPAH_NGG1_F12E12_ | UAGCGAACUGAGAAGGGCCAGUUUUAGAGCUAGAAAUAGCAAG | 349 |
| TtoC | UUAAAAUAAGGCUAGUCCGUUAUCAACUUGAAAAAGUGGCACCG | |
| | AGUCGGUGCACAAUACCUCGGCCCUUCUCAGUU | |
| hPAH_NGG1_F11E12_ | UAGCGAACUGAGAAGGGCCAGUUUUAGAGCUAGAAAUAGCAAG | 350 |
| TtoC | UUAAAAUAAGGCUAGUCCGUUAUCAACUUGAAAAAGUGGCACCG | |
| | AGUCGGUGCACAAUACCUCGGCCCUUCUCAGU | |
| hPAH_NGG1_F10E12_ | UAGCGAACUGAGAAGGGCCAGUUUUAGAGCUAGAAAUAGCAAG | 351 |
| TtoC | UUAAAAUAAGGCUAGUCCGUUAUCAACUUGAAAAAGUGGCACCG | |
| | AGUCGGUGCACAAUACCUCGGCCCUUCUCAG | |
| hPAH_NGG1_F9E12_ | UAGCGAACUGAGAAGGGCCAGUUUUAGAGCUAGAAAUAGCAAG | 352 |
| TtoC | UUAAAAUAAGGCUAGUCCGUUAUCAACUUGAAAAAGUGGCACCG | |
| | AGUCGGUGCACAAUACCUCGGCCCUUCUCA | |
| hPAH_NGG1_F8E12_ | UAGCGAACUGAGAAGGGCCAGUUUUAGAGCUAGAAAUAGCAAG | 353 |
| TtoC | UUAAAAUAAGGCUAGUCCGUUAUCAACUUGAAAAAGUGGCACCG | |
| | AGUCGGUGCACAAUACCUCGGCCCUUCUC | |
| hPAH_NGG1_F7E12_ | UAGCGAACUGAGAAGGGCCAGUUUUAGAGCUAGAAAUAGCAAG | 354 |
| TtoC | UUAAAAUAAGGCUAGUCCGUUAUCAACUUGAAAAAGUGGCACCG | |
| | AGUCGGUGCACAAUACCUCGGCCCUUCU | |
| hPAH_NGG1_F15E14_ | UAGCGAACUGAGAAGGGCCAGUUUUAGAGCUAGAAAUAGCAAG | 355 |
| TtoC | UUAAAAUAAGGCUAGUCCGUUAUCAACUUGAAAAAGUGGCACCG | |
| | AGUCGGUGCCCACAAUACCUCGGCCCUUCUCAGUUCGC | |
| hPAH_NGG1_F14E14_ | UAGCGAACUGAGAAGGGCCAGUUUUAGAGCUAGAAAUAGCAAG | 356 |
| TtoC | UUAAAAUAAGGCUAGUCCGUUAUCAACUUGAAAAAGUGGCACCG | |
| | AGUCGGUGCCCACAAUACCUCGGCCCUUCUCAGUUCG | |
| hPAH_NGG1_F13E14_ | UAGCGAACUGAGAAGGGCCAGUUUUAGAGCUAGAAAUAGCAAG | 357 |
| TtoC | UUAAAAUAAGGCUAGUCCGUUAUCAACUUGAAAAAGUGGCACCG | |
| | AGUCGGUGCCCACAAUACCUCGGCCCUUCUCAGUUC | |
| hPAH_NGG1_F12E14_ | UAGCGAACUGAGAAGGGCCAGUUUUAGAGCUAGAAAUAGCAAG | 358 |
| TtoC | UUAAAAUAAGGCUAGUCCGUUAUCAACUUGAAAAAGUGGCACCG | |
| | AGUCGGUGCCCACAAUACCUCGGCCCUUCUCAGUU | |
| hPAH_NGG1_F11E14_ | UAGCGAACUGAGAAGGGCCAGUUUUAGAGCUAGAAAUAGCAAG | 359 |
| TtoC | UUAAAAUAAGGCUAGUCCGUUAUCAACUUGAAAAAGUGGCACCG | |
| | AGUCGGUGCCCACAAUACCUCGGCCCUUCUCAGU | |
| hPAH_NGG1_F10E14_ | UAGCGAACUGAGAAGGGCCAGUUUUAGAGCUAGAAAUAGCAAG | 360 |
| TtoC | UUAAAAUAAGGCUAGUCCGUUAUCAACUUGAAAAAGUGGCACCG | |
| | AGUCGGUGCCCACAAUACCUCGGCCCUUCUCAG | |
| hPAH_NGG1_F9E14_ | UAGCGAACUGAGAAGGGCCAGUUUUAGAGCUAGAAAUAGCAAG | 361 |
| TtoC | UUAAAAUAAGGCUAGUCCGUUAUCAACUUGAAAAAGUGGCACCG | |
| | AGUCGGUGCCCACAAUACCUCGGCCCUUCUCA | |
| hPAH_NGG1_F8E14_ | UAGCGAACUGAGAAGGGCCAGUUUUAGAGCUAGAAAUAGCAAG | 362 |
| TtoC | UUAAAAUAAGGCUAGUCCGUUAUCAACUUGAAAAAGUGGCACCG | |
| | AGUCGGUGCCCACAAUACCUCGGCCCUUCUC | |
| hPAH_NGG1_F7E14_ | UAGCGAACUGAGAAGGGCCAGUUUUAGAGCUAGAAAUAGCAAG | 363 |
| TtoC | UUAAAAUAAGGCUAGUCCGUUAUCAACUUGAAAAAGUGGCACCG | |
| | AGUCGGUGCCCACAAUACCUCGGCCCUUCU | |
| hPAH_NGG2_F15E7_ | ACUUUGCUGCCACAAUACCUGUUUUAGAGCUAGAAAUAGCAAGU | 364 |
| AtoG | UAAAAUAAGGCUAGUCCGUUAUCAACUUGAAAAAGUGGCACCGA | |
| | GUCGGUGCGCCGAGGUAUUGUGGCAGCAAA | |
| hPAH_NGG2_F14E7_ | ACUUUGCUGCCACAAUACCUGUUUUAGAGCUAGAAAUAGCAAGU | 365 |
| AtoG | UAAAAUAAGGCUAGUCCGUUAUCAACUUGAAAAAGUGGCACCGA | |
| | GUCGGUGCGCCGAGGUAUUGUGGCAGCAA | |
| hPAH_NGG2_F13E7_ | ACUUUGCUGCCACAAUACCUGUUUUAGAGCUAGAAAUAGCAAGU | 366 |
| AtoG | UAAAAUAAGGCUAGUCCGUUAUCAACUUGAAAAAGUGGCACCGA | |
| | GUCGGUGCGCCGAGGUAUUGUGGCAGCA | |
| hPAH_NGG2_F12E7_ | ACUUUGCUGCCACAAUACCUGUUUUAGAGCUAGAAAUAGCAAGU | 367 |
| AtoG | UAAAAUAAGGCUAGUCCGUUAUCAACUUGAAAAAGUGGCACCGA | |
| | GUCGGUGCGCCGAGGUAUUGUGGCAGC | |
| hPAH_NGG2_F11E7_ | ACUUUGCUGCCACAAUACCUGUUUUAGAGCUAGAAAUAGCAAGU | 368 |
| AtoG | UAAAAUAAGGCUAGUCCGUUAUCAACUUGAAAAAGUGGCACCGA | |
| | GUCGGUGCGCCGAGGUAUUGUGGCAG | |
| hPAH_NGG2_F10E7_ | ACUUUGCUGCCACAAUACCUGUUUUAGAGCUAGAAAUAGCAAGU | 369 |
| AtoG | UAAAAUAAGGCUAGUCCGUUAUCAACUUGAAAAAGUGGCACCGA | |
| | GUCGGUGCGCCGAGGUAUUGUGGCA | |
| hPAH_NGG2_F9E7_ | ACUUUGCUGCCACAAUACCUGUUUUAGAGCUAGAAAUAGCAAGU | 370 |
| AtoG | UAAAAUAAGGCUAGUCCGUUAUCAACUUGAAAAAGUGGCACCGA | |
| | GUCGGUGCGCCGAGGUAUUGUGGC | |
| hPAH_NGG2_F8E7_ | ACUUUGCUGCCACAAUACCUGUUUUAGAGCUAGAAAUAGCAAGU | 371 |
| AtoG | UAAAAUAAGGCUAGUCCGUUAUCAACUUGAAAAAGUGGCACCGA | |
| | GUCGGUGCGCCGAGGUAUUGUGG | |
| hPAH_NGG2_F7E7_ | ACUUUGCUGCCACAAUACCUGUUUUAGAGCUAGAAAUAGCAAGU | 372 |
| AtoG | UAAAAUAAGGCUAGUCCGUUAUCAACUUGAAAAAGUGGCACCGA | |
| | GUCGGUGCGCCGAGGUAUUGUG | |
| hPAH_NGG2_F15E9_ | ACUUUGCUGCCACAAUACCUGUUUUAGAGCUAGAAAUAGCAAGU | 373 |
| AtoG | UAAAAUAAGGCUAGUCCGUUAUCAACUUGAAAAAGUGGCACCGA | |
| | GUCGGUGCGGGCCGAGGUAUUGUGGCAGCAAA | |
| hPAH_NGG2_F14E9_ | ACUUUGCUGCCACAAUACCUGUUUUAGAGCUAGAAAUAGCAAGU | 374 |
| AtoG | UAAAAUAAGGCUAGUCCGUUAUCAACUUGAAAAAGUGGCACCGA | |
| | GUCGGUGCGGGCCGAGGUAUUGUGGCAGCAA | |
| hPAH_NGG2_F13E9_ | ACUUUGCUGCCACAAUACCUGUUUUAGAGCUAGAAAUAGCAAGU | 375 |
| AtoG | UAAAAUAAGGCUAGUCCGUUAUCAACUUGAAAAAGUGGCACCGA | |
| | GUCGGUGCGGGCCGAGGUAUUGUGGCAGCA | |
| hPAH_NGG2_F12E9_ | ACUUUGCUGCCACAAUACCUGUUUUAGAGCUAGAAAUAGCAAGU | 376 |
| AtoG | UAAAAUAAGGCUAGUCCGUUAUCAACUUGAAAAAGUGGCACCGA | |
| | GUCGGUGCGGGCCGAGGUAUUGUGGCAGC | |
| hPAH_NGG2_F11E9_ | ACUUUGCUGCCACAAUACCUGUUUUAGAGCUAGAAAUAGCAAGU | 377 |
| AtoG | UAAAAUAAGGCUAGUCCGUUAUCAACUUGAAAAAGUGGCACCGA | |
| | GUCGGUGCGGGCCGAGGUAUUGUGGCAG | |
| hPAH_NGG2_F10E9_ | ACUUUGCUGCCACAAUACCUGUUUUAGAGCUAGAAAUAGCAAGU | 378 |
| AtoG | UAAAAUAAGGCUAGUCCGUUAUCAACUUGAAAAAGUGGCACCGA | |
| | GUCGGUGCGGGCCGAGGUAUUGUGGCA | |
| hPAH_NGG2_F9E9_ | ACUUUGCUGCCACAAUACCUGUUUUAGAGCUAGAAAUAGCAAGU | 379 |
| AtoG | UAAAAUAAGGCUAGUCCGUUAUCAACUUGAAAAAGUGGCACCGA | |
| | GUCGGUGCGGGCCGAGGUAUUGUGGC | |
| hPAH_NGG2_F8E9_ | ACUUUGCUGCCACAAUACCUGUUUUAGAGCUAGAAAUAGCAAGU | 380 |
| AtoG | UAAAAUAAGGCUAGUCCGUUAUCAACUUGAAAAAGUGGCACCGA | |
| | GUCGGUGCGGGCCGAGGUAUUGUGG | |
| hPAH_NGG2_F7E9_ | ACUUUGCUGCCACAAUACCUGUUUUAGAGCUAGAAAUAGCAAGU | 381 |
| AtoG | UAAAAUAAGGCUAGUCCGUUAUCAACUUGAAAAAGUGGCACCGA | |
| | GUCGGUGCGGGCCGAGGUAUUGUG | |
| hPAH_NGG2_F15E11_ | ACUUUGCUGCCACAAUACCUGUUUUAGAGCUAGAAAUAGCAAGU | 382 |
| AtoG | UAAAAUAAGGCUAGUCCGUUAUCAACUUGAAAAAGUGGCACCGA | |
| | GUCGGUGCAAGGGCCGAGGUAUUGUGGCAGCAAA | |
| hPAH_NGG2_F14E11_ | ACUUUGCUGCCACAAUACCUGUUUUAGAGCUAGAAAUAGCAAGU | 383 |
| AtoG | UAAAAUAAGGCUAGUCCGUUAUCAACUUGAAAAAGUGGCACCGA | |
| | GUCGGUGCAAGGGCCGAGGUAUUGUGGCAGCAA | |
| hPAH_NGG2_F13E11_ | ACUUUGCUGCCACAAUACCUGUUUUAGAGCUAGAAAUAGCAAGU | 384 |
| AtoG | UAAAAUAAGGCUAGUCCGUUAUCAACUUGAAAAAGUGGCACCGA | |
| | GUCGGUGCAAGGGCCGAGGUAUUGUGGCAGCA | |
| hPAH_NGG2_F12E11_ | ACUUUGCUGCCACAAUACCUGUUUUAGAGCUAGAAAUAGCAAGU | 385 |
| AtoG | UAAAAUAAGGCUAGUCCGUUAUCAACUUGAAAAAGUGGCACCGA | |
| | GUCGGUGCAAGGGCCGAGGUAUUGUGGCAGC | |
| hPAH_NGG2_F11E11_ | ACUUUGCUGCCACAAUACCUGUUUUAGAGCUAGAAAUAGCAAGU | 386 |
| AtoG | UAAAAUAAGGCUAGUCCGUUAUCAACUUGAAAAAGUGGCACCGA | |
| | GUCGGUGCAAGGGCCGAGGUAUUGUGGCAG | |
| hPAH_NGG2_F10E11_ | ACUUUGCUGCCACAAUACCUGUUUUAGAGCUAGAAAUAGCAAGU | 387 |
| AtoG | UAAAAUAAGGCUAGUCCGUUAUCAACUUGAAAAAGUGGCACCGA | |
| | GUCGGUGCAAGGGCCGAGGUAUUGUGGCA | |
| hPAH_NGG2_F9E11_ | ACUUUGCUGCCACAAUACCUGUUUUAGAGCUAGAAAUAGCAAGU | 388 |
| AtoG | UAAAAUAAGGCUAGUCCGUUAUCAACUUGAAAAAGUGGCACCGA | |
| | GUCGGUGCAAGGGCCGAGGUAUUGUGGC | |
| hPAH_NGG2_F8E11_ | ACUUUGCUGCCACAAUACCUGUUUUAGAGCUAGAAAUAGCAAGU | 389 |
| AtoG | UAAAAUAAGGCUAGUCCGUUAUCAACUUGAAAAAGUGGCACCGA | |
| | GUCGGUGCAAGGGCCGAGGUAUUGUGG | |
| hPAH_NGG2_F7E11_ | ACUUUGCUGCCACAAUACCUGUUUUAGAGCUAGAAAUAGCAAGU | 390 |
| AtoG | UAAAAUAAGGCUAGUCCGUUAUCAACUUGAAAAAGUGGCACCGA | |
| | GUCGGUGCAAGGGCCGAGGUAUUGUG | |
| hPAH_NGG2_F15E13_ | ACUUUGCUGCCACAAUACCUGUUUUAGAGCUAGAAAUAGCAAGU | 391 |
| AtoG | UAAAAUAAGGCUAGUCCGUUAUCAACUUGAAAAAGUGGCACCGA | |
| | GUCGGUGCAGAAGGGCCGAGGUAUUGUGGCAGCAAA | |
| hPAH_NGG2_F14E13_ | ACUUUGCUGCCACAAUACCUGUUUUAGAGCUAGAAAUAGCAAGU | 392 |
| AtoG | UAAAAUAAGGCUAGUCCGUUAUCAACUUGAAAAAGUGGCACCGA | |
| | GUCGGUGCAGAAGGGCCGAGGUAUUGUGGCAGCAA | |
| hPAH_NGG2_F13E13_ | ACUUUGCUGCCACAAUACCUGUUUUAGAGCUAGAAAUAGCAAGU | 393 |
| AtoG | UAAAAUAAGGCUAGUCCGUUAUCAACUUGAAAAAGUGGCACCGA | |
| | GUCGGUGCAGAAGGGCCGAGGUAUUGUGGCAGCA | |
| hPAH_NGG2_F12E13_ | ACUUUGCUGCCACAAUACCUGUUUUAGAGCUAGAAAUAGCAAGU | 394 |
| AtoG | UAAAAUAAGGCUAGUCCGUUAUCAACUUGAAAAAGUGGCACCGA | |
| | GUCGGUGCAGAAGGGCCGAGGUAUUGUGGCAGC | |
| hPAH_NGG2_F11E13_ | ACUUUGCUGCCACAAUACCUGUUUUAGAGCUAGAAAUAGCAAGU | 395 |
| AtoG | UAAAAUAAGGCUAGUCCGUUAUCAACUUGAAAAAGUGGCACCGA | |
| | GUCGGUGCAGAAGGGCCGAGGUAUUGUGGCAG | |
| hPAH_NGG2_F10E13_ | ACUUUGCUGCCACAAUACCUGUUUUAGAGCUAGAAAUAGCAAGU | 396 |
| AtoG | UAAAAUAAGGCUAGUCCGUUAUCAACUUGAAAAAGUGGCACCGA | |
| | GUCGGUGCAGAAGGGCCGAGGUAUUGUGGCA | |
| hPAH_NGG2_F9E13_ | ACUUUGCUGCCACAAUACCUGUUUUAGAGCUAGAAAUAGCAAGU | 397 |
| AtoG | UAAAAUAAGGCUAGUCCGUUAUCAACUUGAAAAAGUGGCACCGA | |
| | GUCGGUGCAGAAGGGCCGAGGUAUUGUGGC | |
| hPAH_NGG2_F8E13_ | ACUUUGCUGCCACAAUACCUGUUUUAGAGCUAGAAAUAGCAAGU | 398 |
| AtoG | UAAAAUAAGGCUAGUCCGUUAUCAACUUGAAAAAGUGGCACCGA | |
| | GUCGGUGCAGAAGGGCCGAGGUAUUGUGG | |
| hPAH_NGG2_F7E13_ | ACUUUGCUGCCACAAUACCUGUUUUAGAGCUAGAAAUAGCAAGU | 399 |
| AtoG | UAAAAUAAGGCUAGUCCGUUAUCAACUUGAAAAAGUGGCACCGA | |
| | GUCGGUGCAGAAGGGCCGAGGUAUUGUG | |
| hPAH_NGG2_F15E15_ | ACUUUGCUGCCACAAUACCUGUUUUAGAGCUAGAAAUAGCAAGU | 400 |
| AtoG | UAAAAUAAGGCUAGUCCGUUAUCAACUUGAAAAAGUGGCACCGA | |
| | GUCGGUGCUGAGAAGGGCCGAGGUAUUGUGGCAGCAAA | |
| hPAH_NGG2_F14E15_ | ACUUUGCUGCCACAAUACCUGUUUUAGAGCUAGAAAUAGCAAGU | 401 |
| AtoG | UAAAAUAAGGCUAGUCCGUUAUCAACUUGAAAAAGUGGCACCGA | |
| | GUCGGUGCUGAGAAGGGCCGAGGUAUUGUGGCAGCAA | |
| hPAH_NGG2_F13E15_ | ACUUUGCUGCCACAAUACCUGUUUUAGAGCUAGAAAUAGCAAGU | 402 |
| AtoG | UAAAAUAAGGCUAGUCCGUUAUCAACUUGAAAAAGUGGCACCGA | |
| | GUCGGUGCUGAGAAGGGCCGAGGUAUUGUGGCAGCA | |
| hPAH_NGG2_F12E15_ | ACUUUGCUGCCACAAUACCUGUUUUAGAGCUAGAAAUAGCAAGU | 403 |
| AtoG | UAAAAUAAGGCUAGUCCGUUAUCAACUUGAAAAAGUGGCACCGA | |
| | GUCGGUGCUGAGAAGGGCCGAGGUAUUGUGGCAGC | |
| hPAH_NGG2_F11E15_ | ACUUUGCUGCCACAAUACCUGUUUUAGAGCUAGAAAUAGCAAGU | 404 |
| AtoG | UAAAAUAAGGCUAGUCCGUUAUCAACUUGAAAAAGUGGCACCGA | |
| | GUCGGUGCUGAGAAGGGCCGAGGUAUUGUGGCAG | |
| hPAH_NGG2_F10E15_ | ACUUUGCUGCCACAAUACCUGUUUUAGAGCUAGAAAUAGCAAGU | 405 |
| AtoG | UAAAAUAAGGCUAGUCCGUUAUCAACUUGAAAAAGUGGCACCGA | |
| | GUCGGUGCUGAGAAGGGCCGAGGUAUUGUGGCA | |
| hPAH_NGG2_F9E15_ | ACUUUGCUGCCACAAUACCUGUUUUAGAGCUAGAAAUAGCAAGU | 406 |
| AtoG | UAAAAUAAGGCUAGUCCGUUAUCAACUUGAAAAAGUGGCACCGA | |
| | GUCGGUGCUGAGAAGGGCCGAGGUAUUGUGGC | |
| hPAH_NGG2_F8E15_ | ACUUUGCUGCCACAAUACCUGUUUUAGAGCUAGAAAUAGCAAGU | 407 |
| AtoG | UAAAAUAAGGCUAGUCCGUUAUCAACUUGAAAAAGUGGCACCGA | |
| | GUCGGUGCUGAGAAGGGCCGAGGUAUUGUGG | |
| hPAH_NGG2_F7E15_ | ACUUUGCUGCCACAAUACCUGUUUUAGAGCUAGAAAUAGCAAGU | 408 |
| AtoG | UAAAAUAAGGCUAGUCCGUUAUCAACUUGAAAAAGUGGCACCGA | |
| | GUCGGUGCUGAGAAGGGCCGAGGUAUUGUG | |

¹For RNA, T is U; U are T in the sequence listing. For each entry, the spacer sequence is underlined and the extension arm is bold. The description indicates the length of the FBS (F) and ET (E) or homology region of the extension arm.

TABLE 12B
EXEMPLARY MODIFIED tagRNA SEQUENCES FOR EDITING PAH

| NAME | SEQUENCE^{1,2} | SEQ ID NO: |
|---|---|---|
| hPAH_NGG1_F15E6_ | mU*mA*mG*rCrGrArArCrUrGrArGrArArGrGrGrCrCrArGrUrUrUrUrAr | 409 |
| TtoC | GrAmGmCmUmAmGmAmAmAmUmAmGmCrArArGrUrUrArArArArUr | |
| | ArArGrGrCrUrArGrUrCrCrGrUrUrArUrCmAmAmCmUmUmGmAmAmA | |
| | mAmAmGmUmGmGmCmAmCmCmGmAmGmUmCmGmGmUmGmCrC | |
| | rCrUrCrGrGrCrCrCrUrUrCrUrCrArGrUrU*mC*mG*mC | |
| hPAH_NGG1_F14E6_ | mU*mA*mG*rCrGrArArCrUrGrArGrArArGrGrGrCrCrArGrUrUrUrUrAr | 410 |
| TtoC | GrAmGmCmUmAmGmAmAmAmUmAmGmCrArArGrUrUrArArArArUr | |
| | ArArGrGrCrUrArGrUrCrCrGrUrUrArUrCmAmAmCmUmUmGmAmAmA | |
| | mAmAmGmUmGmGmCmAmCmCmGmAmGmUmCmGmGmUmGmCrC | |
| | rCrUrCrGrGrCrCrCrUrUrCrUrCrArGrU*mU*mC*mG | |
| hPAH_NGG1_F13E6_ | mU*mA*mG*rCrGrArArCrUrGrArGrArArGrGrGrCrCrArGrUrUrUrUrAr | 411 |
| TtoC | GrAmGmCmUmAmGmAmAmAmUmAmGmCrArArGrUrUrArArArArUr | |
| | ArArGrGrCrUrArGrUrCrCrGrUrUrArUrCmAmAmCmUmUmGmAmAmA | |
| | mAmAmGmUmGmGmCmAmCmCmGmAmGmUmCmGmGmUmGmCrC | |
| | rCrUrCrGrGrCrCrCrUrUrCrUrCrArG*mU*mU*mC | |
| hPAH_NGG1_F12E6_ | mU*mA*mG*rCrGrArArCrUrGrArGrArArGrGrGrCrCrArGrUrUrUrUrAr | 412 |
| TtoC | GrAmGmCmUmAmGmAmAmAmUmAmGmCrArArGrUrUrArArArArUr | |
| | ArArGrGrCrUrArGrUrCrCrGrUrUrArUrCmAmAmCmUmUmGmAmAmA | |
| | mAmAmGmUmGmGmCmAmCmCmGmAmGmUmCmGmGmUmGmCrC | |
| | rCrUrCrGrGrCrCrCrUrUrCrUrCrA*mG*mU*mU | |
| hPAH_NGG1_F11E6_ | mU*mA*mG*rCrGrArArCrUrGrArGrArArGrGrGrCrCrArGrUrUrUrUrAr | 413 |
| TtoC | GrAmGmCmUmAmGmAmAmAmUmAmGmCrArArGrUrUrArArArArUr | |
| | ArArGrGrCrUrArGrUrCrCrGrUrUrArUrCmAmAmCmUmUmGmAmAmA | |
| | mAmAmGmUmGmGmCmAmCmCmGmAmGmUmCmGmGmUmGmCrC | |
| | rCrUrCrGrGrCrCrCrUrUrCrUrC*mA*mG*mU | |
| hPAH_NGG1_F10R6_ | mU*mA*mG*rCrGrArArCrUrGrArGrArArGrGrGrCrCrArGrUrUrUrUrAr | 414 |
| TtoC | GrAmGmCmUmAmGmAmAmAmUmAmGmCrArArGrUrUrArArArArUr | |
| | ArArGrGrCrUrArGrUrCrCrGrUrUrArUrCmAmAmCmUmUmGmAmAmA | |
| | mAmAmGmUmGmGmCmAmCmCmGmAmGmUmCmGmGmUmGmCrC | |
| | rCrUrCrGrGrCrCrCrUrUrCrU*mC*mA*mG | |
| hPAH_NGG1_F9E6_ | mU*mA*mG*rCrGrArArCrUrGrArGrArArGrGrGrCrCrArGrUrUrUrUrAr | 415 |
| TtoC | GrAmGmCmUmAmGmAmAmAmUmAmGmCrArArGrUrUrArArArArUr | |
| | ArArGrGrCrUrArGrUrCrCrGrUrUrArUrCmAmAmCmUmUmGmAmAmA | |
| | mAmAmGmUmGmGmCmAmCmCmGmAmGmUmCmGmGmUmGmCrC | |
| | rCrUrCrGrGrCrCrCrUrUrC*mU*mC*mA | |
| hPAH_NGG1_F8E6_ | mU*mA*mG*rCrGrArArCrUrGrArGrArArGrGrGrCrCrArGrUrUrUrUrAr | 416 |
| TtoC | GrAmGmCmUmAmGmAmAmAmUmAmGmCrArArGrUrUrArArArArUr | |
| | ArArGrGrCrUrArGrUrCrCrGrUrUrArUrCmAmAmCmUmUmGmAmAmA | |
| | mAmAmGmUmGmGmCmAmCmCmGmAmGmUmCmGmGmUmGmCrC | |
| | rCrUrCrGrGrCrCrCrUrU*mC*mU*mC | |
| hPAH_NGG1_F7R6_ | mU*mA*mG*rCrGrArArCrUrGrArGrArArGrGrGrCrCrArGrUrUrUrUrAr | 417 |
| TtoC | GrAmGmCmUmAmGmAmAmAmUmAmGmCrArArGrUrUrArArArArUr | |
| | ArArGrGrCrUrArGrUrCrCrGrUrUrArUrCmAmAmCmUmUmGmAmAmA | |
| | mAmAmGmUmGmGmCmAmCmCmGmAmGmUmCmGmGmUmGmCrC | |
| | rCrUrCrGrGrCrCrCrU*mU*mC*mU | |
| hPAH_NGG1_F15E8_ | mU*mA*mG*rCrGrArArCrUrGrArGrArArGrGrGrCrCrArGrUrUrUrUrAr | 418 |
| TtoC | GrAmGmCmUmAmGmAmAmAmUmAmGmCrArArGrUrUrArArArArUr | |
| | ArArGrGrCrUrArGrUrCrCrGrUrUrArUrCmAmAmCmUmUmGmAmAmA | |
| | mAmAmGmUmGmGmCmAmCmCmGmAmGmUmCmGmGmUmGmCrU | |
| | rArCrCrUrCrGrGrCrCrCrUrUrCrUrCrArGrUrU*mC*mG*mC | |
| hPAH_NGG1_F14E8_ | mU*mA*mG*rCrGrArArCrUrGrArGrArArGrGrGrCrCrArGrUrUrUrUrAr | 419 |
| TtoC | GrAmGmCmUmAmGmAmAmAmUmAmGmCrArArGrUrUrArArArArUr | |
| | ArArGrGrCrUrArGrUrCrCrGrUrUrArUrCmAmAmCmUmUmGmAmAmA | |
| | mAmAmGmUmGmGmCmAmCmCmGmAmGmUmCmGmGmUmGmCrU | |
| | rArCrCrUrCrGrGrCrCrCrUrUrCrUrCrArGrU*mU*mC*mG | |
| hPAH_NGG1_F13E8_ | mU*mA*mG*rCrGrArArCrUrGrArGrArArGrGrGrCrCrArGrUrUrUrUrAr | 420 |
| TtoC | GrAmGmCmUmAmGmAmAmAmUmAmGmCrArArGrUrUrArArArArUr | |
| | ArArGrGrCrUrArGrUrCrCrGrUrUrArUrCmAmAmCmUmUmGmAmAmA | |
| | mAmAmGmUmGmGmCmAmCmCmGmAmGmUmCmGmGmUmGmCrU | |
| | rArCrCrUrCrGrGrCrCrCrUrUrCrUrCrArG*mU*mU*mC | |
| hPAH_NGG1_F12E8_ | mU*mA*mG*rCrGrArArCrUrGrArGrArArGrGrGrCrCrArGrUrUrUrUrAr | 421 |
| TtoC | GrAmGmCmUmAmGmAmAmAmUmAmGmCrArArGrUrUrArArArArUr | |
| | ArArGrGrCrUrArGrUrCrCrGrUrUrArUrCmAmAmCmUmUmGmAmAmA | |
| | mAmAmGmUmGmGmCmAmCmCmGmAmGmUmCmGmGmUmGmCrU | |
| | rArCrCrUrCrGrGrCrCrCrUrUrCrUrCrA*mG*mU*mU | |
| hPAH_NGG1_F11E8_ | mU*mA*mG*rCrGrArArCrUrGrArGrArArGrGrGrCrCrArGrUrUrUrUrAr | 422 |
| TtoC | GrAmGmCmUmAmGmAmAmAmUmAmGmCrArArGrUrUrArArArArUr | |
| | ArArGrGrCrUrArGrUrCrCrGrUrUrArUrCmAmAmCmUmUmGmAmAmA | |
| | mAmAmGmUmGmGmCmAmCmCmGmAmGmUmCmGmGmUmGmCrU | |
| | rArCrCrUrCrGrGrCrCrCrUrUrCrUrC*mA*mG*mU | |
| hPAH_NGG1_F10E8_ | mU*mA*mG*rCrGrArArCrUrGrArGrArArGrGrGrCrCrArGrUrUrUrUrAr | 423 |
| TtoC | GrAmGmCmUmAmGmAmAmAmUmAmGmCrArArGrUrUrArArArArUr | |
| | ArArGrGrCrUrArGrUrCrCrGrUrUrArUrCmAmAmCmUmUmGmAmAmA | |
| | mAmAmGmUmGmGmCmAmCmCmGmAmGmUmCmGmGmUmGmCrU | |
| | rArCrCrUrCrGrGrCrCrCrUrUrCrU*mC*mA*mG | |
| hPAH_NGG1_F9E8_ | mU*mA*mG*rCrGrArArCrUrGrArGrArArGrGrGrCrCrArGrUrUrUrUrAr | 424 |
| TtoC | GrAmGmCmUmAmGmAmAmAmUmAmGmCrArArGrUrUrArArArArUr | |
| | ArArGrGrCrUrArGrUrCrCrGrUrUrArUrCmAmAmCmUmUmGmAmAmA | |
| | mAmAmGmUmGmGmCmAmCmCmGmAmGmUmCmGmGmUmGmCrU | |
| | rArCrCrUrCrGrGrCrCrCrUrUrC*mU*mC*mA | |
| hPAH_NGG1_F8E8_ | mU*mA*mG*rCrGrArArCrUrGrArGrArArGrGrGrCrCrArGrUrUrUrUrAr | 425 |
| TtoC | GrAmGmCmUmAmGmAmAmAmUmAmGmCrArArGrUrUrArArArArUr | |
| | ArArGrGrCrUrArGrUrCrCrGrUrUrArUrCmAmAmCmUmUmGmAmAmA | |
| | mAmAmGmUmGmGmCmAmCmCmGmAmGmUmCmGmGmUmGmCrU | |
| | rArCrCrUrCrGrGrCrCrCrUrU*mC*mU*mC | |
| hPAH_NGG1_F7E8_ | mU*mA*mG*rCrGrArArCrUrGrArGrArArGrGrGrCrCrArGrUrUrUrUrAr | 426 |
| TtoC | GrAmGmCmUmAmGmAmAmAmUmAmGmCrArArGrUrUrArArArArUr | |
| | ArArGrGrCrUrArGrUrCrCrGrUrUrArUrCmAmAmCmUmUmGmAmAmA | |
| | mAmAmGmUmGmGmCmAmCmCmGmAmGmUmCmGmGmUmGmCrU | |
| | rArCrCrUrCrGrGrCrCrCrU*mU*mC*mU | |
| hPAH_NGG1_F15E10_ | mU*mA*mG*rCrGrArArCrUrGrArGrArArGrGrGrCrCrArGrUrUrUrUrAr | 427 |
| TtoC | GrAmGmCmUmAmGmAmAmAmUmAmGmCrArArGrUrUrArArArArUr | |
| | ArArGrGrCrUrArGrUrCrCrGrUrUrArUrCmAmAmCmUmUmGmAmAmA | |
| | mAmAmGmUmGmGmCmAmCmCmGmAmGmUmCmGmGmUmGmCrA | |
| | rArUrArCrCrUrCrGrGrCrCrCrUrUrCrUrCrArGrUrU*mC*mG*mC | |
| hPAH_NGG1_F14E10_ | mU*mA*mG*rCrGrArArCrUrGrArGrArArGrGrGrCrCrArGrUrUrUrUrAr | 428 |
| TtoC | GrAmGmCmUmAmGmAmAmAmUmAmGmCrArArGrUrUrArArArArUr | |
| | ArArGrGrCrUrArGrUrCrCrGrUrUrArUrCmAmAmCmUmUmGmAmAmA | |
| | mAmAmGmUmGmGmCmAmCmCmGmAmGmUmCmGmGmUmGmCrA | |
| | rArUrArCrCrUrCrGrGrCrCrCrUrUrCrUrCrArGrU*mU*mC*mG | |
| hPAH_NGG1_F13E10_ | mU*mA*mG*rCrGrArArCrUrGrArGrArArGrGrGrCrCrArGrUrUrUrUrAr | 429 |
| TtoC | GrAmGmCmUmAmGmAmAmAmUmAmGmCrArArGrUrUrArArArArUr | |
| | ArArGrGrCrUrArGrUrCrCrGrUrUrArUrCmAmAmCmUmUmGmAmAmA | |
| | mAmAmGmUmGmGmCmAmCmCmGmAmGmUmCmGmGmUmGmCrA | |
| | rArUrArCrCrUrCrGrGrCrCrCrUrUrCrUrCrArG*mU*mU*mC | |
| hPAH_NGG1_F12E10_ | mU*mA*mG*rCrGrArArCrUrGrArGrArArGrGrGrCrCrArGrUrUrUrUrAr | 430 |
| TtoC | GrAmGmCmUmAmGmAmAmAmUmAmGmCrArArGrUrUrArArArArUr | |
| | ArArGrGrCrUrArGrUrCrCrGrUrUrArUrCmAmAmCmUmUmGmAmAmA | |
| | mAmAmGmUmGmGmCmAmCmCmGmAmGmUmCmGmGmUmGmCrA | |
| | rArUrArCrCrUrCrGrGrCrCrCrUrUrCrUrCrA*mG*mU*mU | |
| hPAH_NGG1_F11E10_ | mU*mA*mG*rCrGrArArCrUrGrArGrArArGrGrGrCrCrArGrUrUrUrUrAr | 431 |
| TtoC | GrAmGmCmUmAmGmAmAmAmUmAmGmCrArArGrUrUrArArArArUr | |
| | ArArGrGrCrUrArGrUrCrCrGrUrUrArUrCmAmAmCmUmUmGmAmAmA | |
| | mAmAmGmUmGmGmCmAmCmCmGmAmGmUmCmGmGmUmGmCrA | |
| | rArUrArCrCrUrCrGrGrCrCrCrUrUrCrUrC*mA*mG*mU | |
| hPAH_NGG1_F10E10_ | mU*mA*mG*rCrGrArArCrUrGrArGrArArGrGrGrCrCrArGrUrUrUrUrAr | 432 |
| TtoC | GrAmGmCmUmAmGmAmAmAmUmAmGmCrArArGrUrUrArArArArUr | |
| | ArArGrGrCrUrArGrUrCrCrGrUrUrArUrCmAmAmCmUmUmGmAmAmA | |
| | mAmAmGmUmGmGmCmAmCmCmGmAmGmUmCmGmGmUmGmCrA | |
| | rArUrArCrCrUrCrGrGrCrCrCrUrUrCrU*mC*mA*mG | |
| hPAH_NGG1_F9E10_ | mU*mA*mG*rCrGrArArCrUrGrArGrArArGrGrGrCrCrArGrUrUrUrUrAr | 433 |
| TtoC | GrAmGmCmUmAmGmAmAmAmUmAmGmCrArArGrUrUrArArArArUr | |
| | ArArGrGrCrUrArGrUrCrCrGrUrUrArUrCmAmAmCmUmUmGmAmAmA | |
| | mAmAmGmUmGmGmCmAmCmCmGmAmGmUmCmGmGmUmGmCrA | |
| | rArUrArCrCrUrCrGrGrCrCrCrUrUrC*mU*mC*mA | |
| hPAH_NGG1_F8E10_ | mU*mA*mG*rCrGrArArCrUrGrArGrArArGrGrGrCrCrArGrUrUrUrUrAr | 434 |
| TtoC | GrAmGmCmUmAmGmAmAmAmUmAmGmCrArArGrUrUrArArArArUr | |
| | ArArGrGrCrUrArGrUrCrCrGrUrUrArUrCmAmAmCmUmUmGmAmAmA | |
| | mAmAmGmUmGmGmCmAmCmCmGmAmGmUmCmGmGmUmGmCrA | |
| | rArUrArCrCrUrCrGrGrCrCrCrUrU*mC*mU*mC | |
| hPAH_NGG1_F7E10_ | mU*mA*mG*rCrGrArArCrUrGrArGrArArGrGrGrCrCrArGrUrUrUrUrAr | 435 |
| TtoC | GrAmGmCmUmAmGmAmAmAmUmAmGmCrArArGrUrUrArArArArUr | |
| | ArArGrGrCrUrArGrUrCrCrGrUrUrArUrCmAmAmCmUmUmGmAmAmA | |
| | mAmAmGmUmGmGmCmAmCmCmGmAmGmUmCmGmGmUmGmCrA | |
| | rArUrArCrCrUrCrGrGrCrCrCrU*mU*mC*mU | |
| hPAH_NGG1_F14E12_ | mU*mA*mG*rCrGrArArCrUrGrArGrArArGrGrGrCrCrArGrUrUrUrUrAr | 436 |
| TtoC | GrAmGmCmUmAmGmAmAmAmUmAmGmCrArArGrUrUrArArArArUr | |
| | ArArGrGrCrUrArGrUrCrCrGrUrUrArUrCmAmAmCmUmUmGmAmAmA | |
| | mAmAmGmUmGmGmCmAmCmCmGmAmGmUmCmGmGmUmGmCrA | |
| | rCrArArUrArCrCrUrCrGrGrCrCrCrUrUrCrUrCrArGrU*mU*mC* | |
| | mG | |
| hPAH_NGG1_F13E12_ | mU*mA*mG*rCrGrArArCrUrGrArGrArArGrGrGrCrCrArGrUrUrUrUrAr | 437 |
| TtoC | GrAmGmCmUmAmGmAmAmAmUmAmGmCrArArGrUrUrArArArArUr | |
| | ArArGrGrCrUrArGrUrCrCrGrUrUrArUrCmAmAmCmUmUmGmAmAmA | |
| | mAmAmGmUmGmGmCmAmCmCmGmAmGmUmCmGmGmUmGmCrA | |
| | rCrArArUrArCrCrUrCrGrGrCrCrCrUrUrCrUrCrArG*mU*mU*mC | |
| hPAH_NGG1_F12E12_ | mU*mA*mG*rCrGrArArCrUrGrArGrArArGrGrGrCrCrArGrUrUrUrUrAr | 438 |
| TtoC | GrAmGmCmUmAmGmAmAmAmUmAmGmCrArArGrUrUrArArArArUr | |
| | ArArGrGrCrUrArGrUrCrCrGrUrUrArUrCmAmAmCmUmUmGmAmAmA | |
| | mAmAmGmUmGmGmCmAmCmCmGmAmGmUmCmGmGmUmGmCrA | |
| | rCrArArUrArCrCrUrCrGrGrCrCrCrUrUrCrUrCrA*mG*mU*mU | |
| hPAH_NGG1_F11E12_ | mU*mA*mG*rCrGrArArCrUrGrArGrArArGrGrGrCrCrArGrUrUrUrUrAr | 439 |
| TtoC | GrAmGmCmUmAmGmAmAmAmUmAmGmCrArArGrUrUrArArArArUr | |
| | ArArGrGrCrUrArGrUrCrCrGrUrUrArUrCmAmAmCmUmUmGmAmAmA | |
| | mAmAmGmUmGmGmCmAmCmCmGmAmGmUmCmGmGmUmGmCrA | |
| | rCrArArUrArCrCrUrCrGrGrCrCrCrUrUrCrUrC*mA*mG*mU | |
| hPAH_NGG1_F10E12_ | mU*mA*mG*rCrGrArArCrUrGrArGrArArGrGrGrCrCrArGrUrUrUrUrAr | 440 |
| TtoC | GrAmGmCmUmAmGmAmAmAmUmAmGmCrArArGrUrUrArArArArUr | |
| | ArArGrGrCrUrArGrUrCrCrGrUrUrArUrCmAmAmCmUmUmGmAmAmA | |
| | mAmAmGmUmGmGmCmAmCmCmGmAmGmUmCmGmGmUmGmCrA | |
| | rCrArArUrArCrCrUrCrGrGrCrCrCrUrUrCrU*mC*mA*mG | |
| hPAH_NGG1_F9R12_ | mU*mA*mG*rCrGrArArCrUrGrArGrArArGrGrGrCrCrArGrUrUrUrUrAr | 441 |
| TtoC | GrAmGmCmUmAmGmAmAmAmUmAmGmCrArArGrUrUrArArArArUr | |
| | ArArGrGrCrUrArGrUrCrCrGrUrUrArUrCmAmAmCmUmUmGmAmAmA | |
| | mAmAmGmUmGmGmCmAmCmCmGmAmGmUmCmGmGmUmGmCrA | |
| | rCrArArUrArCrCrUrCrGrGrCrCrCrUrUrC*mU*mC*mA | |
| hPAH_NGG1_F8E12_ | mU*mA*mG*rCrGrArArCrUrGrArGrArArGrGrGrCrCrArGrUrUrUrUrAr | 442 |
| TtoC | GrAmGmCmUmAmGmAmAmAmUmAmGmCrArArGrUrUrArArArArUr | |
| | ArArGrGrCrUrArGrUrCrCrGrUrUrArUrCmAmAmCmUmUmGmAmAmA | |
| | mAmAmGmUmGmGmCmAmCmCmGmAmGmUmCmGmGmUmGmCrA | |
| | rCrArArUrArCrCrUrCrGrGrCrCrCrUrU*mC*mU*mC | |
| hPAH_NGG1_F7E12_ | mU*mA*mG*rCrGrArArCrUrGrArGrArArGrGrGrCrCrArGrUrUrUrUrAr | 443 |
| TtoC | GrAmGmCmUmAmGmAmAmAmUmAmGmCrArArGrUrUrArArArArUr | |
| | ArArGrGrCrUrArGrUrCrCrGrUrUrArUrCmAmAmCmUmUmGmAmAmA | |
| | mAmAmGmUmGmGmCmAmCmCmGmAmGmUmCmGmGmUmGmCrA | |
| | rCrArArUrArCrCrUrCrGrGrCrCrCrU*mU*mC*mU | |
| hPAH_NGG1_F15E14_ | mU*mA*mG*rCrGrArArCrUrGrArGrArArGrGrGrCrCrArGrUrUrUrUrAr | 444 |
| TtoC | GrAmGmCmUmAmGmAmAmAmUmAmGmCrArArGrUrUrArArArArUr | |
| | ArArGrGrCrUrArGrUrCrCrGrUrUrArUrCmAmAmCmUmUmGmAmAmA | |
| | mAmAmGmUmGmGmCmAmCmCmGmAmGmUmCmGmGmUmGmCrC | |
| | rCrArCrArArUrArCrCrUrCrGrGrCrCrCrUrUrCrUrCrArGrUrU*m | |
| | C*mG*mC | |
| hPAH_NGG1_F14E14_ | mU*mA*mG*rCrGrArArCrUrGrArGrArArGrGrGrCrCrArGrUrUrUrUrAr | 445 |
| TtoC | GrAmGmCmUmAmGmAmAmAmUmAmGmCrArArGrUrUrArArArArUr | |
| | ArArGrGrCrUrArGrUrCrCrGrUrUrArUrCmAmAmCmUmUmGmAmAmA | |
| | mAmAmGmUmGmGmCmAmCmCmGmAmGmUmCmGmGmUmGmCrC | |
| | rCrArCrArArUrArCrCrUrCrGrGrCrCrCrUrUrCrUrCrArGrU*mU* | |
| | mC*mG | |
| hPAH_NGG1_F13R14_ | mU*mA*mG*rCrGrArArCrUrGrArGrArArGrGrGrCrCrArGrUrUrUrUrAr | 446 |
| TtoC | GrAmGmCmUmAmGmAmAmAmUmAmGmCrArArGrUrUrArArArArUr | |
| | ArArGrGrCrUrArGrUrCrCrGrUrUrArUrCmAmAmCmUmUmGmAmAmA | |
| | mAmAmGmUmGmGmCmAmCmCmGmAmGmUmCmGmGmUmGmCrC | |
| | rCrArCrArArUrArCrCrUrCrGrGrCrCrCrUrUrCrUrCrArG*mU*m | |
| | U*mC | |
| hPAH_NGG1_F12E14_ | mU*mA*mG*rCrGrArArCrUrGrArGrArArGrGrGrCrCrArGrUrUrUrUrAr | 447 |
| TtoC | GrAmGmCmUmAmGmAmAmAmUmAmGmCrArArGrUrUrArArArArUr | |
| | ArArGrGrCrUrArGrUrCrCrGrUrUrArUrCmAmAmCmUmUmGmAmAmA | |
| | mAmAmGmUmGmGmCmAmCmCmGmAmGmUmCmGmGmUmGmCrC | |
| | rCrArCrArArUrArCrCrUrCrGrGrCrCrCrUrUrCrUrCrA*mG*mU* | |
| | mU | |
| hPAH_NGG1_F11E14_ | mU*mA*mG*rCrGrArArCrUrGrArGrArArGrGrGrCrCrArGrUrUrUrUrAr | 448 |
| TtoC | GrAmGmCmUmAmGmAmAmAmUmAmGmCrArArGrUrUrArArArArUr | |
| | ArArGrGrCrUrArGrUrCrCrGrUrUrArUrCmAmAmCmUmUmGmAmAmA | |
| | mAmAmGmUmGmGmCmAmCmCmGmAmGmUmCmGmGmUmGmCrC | |
| | rCrArCrArArUrArCrCrUrCrGrGrCrCrCrUrUrCrUrC*mA*mG*mU | |
| hPAH_NGG1_F10E14_ | mU*mA*mG*rCrGrArArCrUrGrArGrArArGrGrGrCrCrArGrUrUrUrUrAr | 449 |
| TtoC | GrAmGmCmUmAmGmAmAmAmUmAmGmCrArArGrUrUrArArArArUr | |
| | ArArGrGrCrUrArGrUrCrCrGrUrUrArUrCmAmAmCmUmUmGmAmAmA | |
| | mAmAmGmUmGmGmCmAmCmCmGmAmGmUmCmGmGmUmGmCrC | |
| | rCrArCrArArUrArCrCrUrCrGrGrCrCrCrUrUrCrU*mC*mA*mG | |
| hPAH_NGG1_F9E14_ | mU*mA*mG*rCrGrArArCrUrGrArGrArArGrGrGrCrCrArGrUrUrUrUrAr | 450 |
| TtoC | GrAmGmCmUmAmGmAmAmAmUmAmGmCrArArGrUrUrArArArArUr | |
| | ArArGrGrCrUrArGrUrCrCrGrUrUrArUrCmAmAmCmUmUmGmAmAmA | |
| | mAmAmGmUmGmGmCmAmCmCmGmAmGmUmCmGmGmUmGmCrC | |
| | rCrArCrArArUrArCrCrUrCrGrGrCrCrCrUrUrC*mU*mC*mA | |
| hPAH_NGG1_F8R14_ | mU*mA*mG*rCrGrArArCrUrGrArGrArArGrGrGrCrCrArGrUrUrUrUrAr | 451 |
| TtoC | GrAmGmCmUmAmGmAmAmAmUmAmGmCrArArGrUrUrArArArArUr | |
| | ArArGrGrCrUrArGrUrCrCrGrUrUrArUrCmAmAmCmUmUmGmAmAmA | |
| | mAmAmGmUmGmGmCmAmCmCmGmAmGmUmCmGmGmUmGmCrC | |
| | rCrArCrArArUrArCrCrUrCrGrGrCrCrCrUrU*mC*mU*mC | |
| hPAH_NGG1_F7E14_ | mU*mA*mG*rCrGrArArCrUrGrArGrArArGrGrGrCrCrArGrUrUrUrUrAr | 452 |
| TtoC | GrAmGmCmUmAmGmAmAmAmUmAmGmCrArArGrUrUrArArArArUr | |
| | ArArGrGrCrUrArGrUrCrCrGrUrUrArUrCmAmAmCmUmUmGmAmAmA | |
| | mAmAmGmUmGmGmCmAmCmCmGmAmGmUmCmGmGmUmGmCrC | |
| | rCrArCrArArUrArCrCrUrCrGrGrCrCrCrU*mU*mC*mU | |
| hPAH_NGG2_F15E7_ | mA*mC*mU*rUrUrGrCrUrGrCrCrArCrArArUrArCrCrUrGrUrUrUrUrArG | 453 |
| AtoG | rAmGmCmUmAmGmAmAmAmUmAmGmCrArArGrUrUrArArArArUrAr | |
| | ArGrGrCrUrArGrUrCrCrGrUrUrArUrCmAmAmCmUmUmGmAmAmAm | |
| | AmAmGmUmGmGmCmAmCmCmGmAmGmUmCmGmGmUmGmCrGr | |
| | CrCrGrArGrGrUrArUrUrGrUrGrGrCrArGrC*mA*mA*mA | |
| hPAH_NGG2_F14E7_ | mA*mC*mU*rUrUrGrCrUrGrCrCrArCrArArUrArCrCrUrGrUrUrUrUrArG | 454 |
| AtoG | rAmGmCmUmAmGmAmAmAmUmAmGmCrArArGrUrUrArArArArUrAr | |
| | ArGrGrCrUrArGrUrCrCrGrUrUrArUrCmAmAmCmUmUmGmAmAmAm | |
| | AmAmGmUmGmGmCmAmCmCmGmAmGmUmCmGmGmUmGmCrGr | |
| | CrCrGrArGrGrUrArUrUrGrUrGrGrCrArG*mC*mA*mA | |
| hPAH_NGG2_F13E7_ | mA*mC*mU*rUrUrGrCrUrGrCrCrArCrArArUrArCrCrUrGrUrUrUrUrArG | 455 |
| AtoG | rAmGmCmUmAmGmAmAmAmUmAmGmCrArArGrUrUrArArArArUrAr | |
| | ArGrGrCrUrArGrUrCrCrGrUrUrArUrCmAmAmCmUmUmGmAmAmAm | |
| | AmAmGmUmGmGmCmAmCmCmGmAmGmUmCmGmGmUmGmCrGr | |
| | CrCrGrArGrGrUrArUrUrGrUrGrGrCrA*mG*mC*mA | |
| hPAH_NGG2_F12E7_ | mA*mC*mU*rUrUrGrCrUrGrCrCrArCrArArUrArCrCrUrGrUrUrUrUrArG | 456 |
| AtoG | rAmGmCmUmAmGmAmAmAmUmAmGmCrArArGrUrUrArArArArUrAr | |
| | ArGrGrCrUrArGrUrCrCrGrUrUrArUrCmAmAmCmUmUmGmAmAmAm | |
| | AmAmGmUmGmGmCmAmCmCmGmAmGmUmCmGmGmUmGmCrGr | |
| | CrCrGrArGrGrUrArUrUrGrUrGrGrC*mA*mG*mC | |
| hPAH_NGG2_F11E7_ | mA*mC*mU*rUrUrGrCrUrGrCrCrArCrArArUrArCrCrUrGrUrUrUrUrArG | 457 |
| AtoG | rAmGmCmUmAmGmAmAmAmUmAmGmCrArArGrUrUrArArArArUrAr | |
| | ArGrGrCrUrArGrUrCrCrGrUrUrArUrCmAmAmCmUmUmGmAmAmAm | |
| | AmAmGmUmGmGmCmAmCmCmGmAmGmUmCmGmGmUmGmCrGr | |
| | CrCrGrArGrGrUrArUrUrGrUrGrG*mC*mA*mG | |
| hPAH_NGG2_F10E7_ | mA*mC*mU*rUrUrGrCrUrGrCrCrArCrArArUrArCrCrUrGrUrUrUrUrArG | 458 |
| AtoG | rAmGmCmUmAmGmAmAmAmUmAmGmCrArArGrUrUrArArArArUrAr | |
| | ArGrGrCrUrArGrUrCrCrGrUrUrArUrCmAmAmCmUmUmGmAmAmAm | |
| | AmAmGmUmGmGmCmAmCmCmGmAmGmUmCmGmGmUmGmCrGr | |
| | CrCrGrArGrGrUrArUrUrGrUrG*mG*mC*mA | |
| hPAH_NGG2_F9E7_ | mA*mC*mU*rUrUrGrCrUrGrCrCrArCrArArUrArCrCrUrGrUrUrUrUrArG | 459 |
| AtoG | rAmGmCmUmAmGmAmAmAmUmAmGmCrArArGrUrUrArArArArUrAr | |
| | ArGrGrCrUrArGrUrCrCrGrUrUrArUrCmAmAmCmUmUmGmAmAmAm | |
| | AmAmGmUmGmGmCmAmCmCmGmAmGmUmCmGmGmUmGmCrGr | |
| | CrCrGrArGrGrUrArUrUrGrU*mG*mG*mC | |
| hPAH_NGG2_F8E7_ | mA*mC*mU*rUrUrGrCrUrGrCrCrArCrArArUrArCrCrUrGrUrUrUrUrArG | 460 |
| AtoG | rAmGmCmUmAmGmAmAmAmUmAmGmCrArArGrUrUrArArArArUrAr | |
| | ArGrGrCrUrArGrUrCrCrGrUrUrArUrCmAmAmCmUmUmGmAmAmAm | |
| | AmAmGmUmGmGmCmAmCmCmGmAmGmUmCmGmGmUmGmCrGr | |
| | CrCrGrArGrGrUrArUrUrG*mU*mG*mG | |
| hPAH_NGG2_F7E7_ | mA*mC*mU*rUrUrGrCrUrGrCrCrArCrArArUrArCrCrUrGrUrUrUrUrArG | 461 |
| AtoG | rAmGmCmUmAmGmAmAmAmUmAmGmCrArArGrUrUrArArArArUrAr | |
| | ArGrGrCrUrArGrUrCrCrGrUrUrArUrCmAmAmCmUmUmGmAmAmAm | |
| | AmAmGmUmGmGmCmAmCmCmGmAmGmUmCmGmGmUmGmCrGr | |
| | CrCrGrArGrGrUrArUrU*mG*mU*mG | |
| hPAH_NGG2_F15E9_ | mA*mC*mU*rUrUrGrCrUrGrCrCrArCrArArUrArCrCrUrGrUrUrUrUrArG | 462 |
| AtoG | rAmGmCmUmAmGmAmAmAmUmAmGmCrArArGrUrUrArArArArUrAr | |
| | ArGrGrCrUrArGrUrCrCrGrUrUrArUrCmAmAmCmUmUmGmAmAmAm | |
| | AmAmGmUmGmGmCmAmCmCmGmAmGmUmCmGmGmUmGmCrGr | |
| | GrGrCrCrGrArGrGrUrArUrUrGrUrGrGrCrArGrC* mA*mA*mA | |
| hPAH_NGG2_F14E9_ | mA*mC*mU*rUrUrGrCrUrGrCrCrArCrArArUrArCrCrUrGrUrUrUrUrArG | 463 |
| AtoG | rAmGmCmUmAmGmAmAmAmUmAmGmCrArArGrUrUrArArArArUrAr | |
| | ArGrGrCrUrArGrUrCrCrGrUrUrArUrCmAmAmCmUmUmGmAmAmAm | |
| | AmAmGmUmGmGmCmAmCmCmGmAmGmUmCmGmGmUmGmCrGr | |
| | GrGrCrCrGrArGrGrUrArUrUrGrUrGrGrCrArG*mC*mA*mA | |
| hPAH_NGG2_F13E9_ | mA*mC*mU*rUrUrGrCrUrGrCrCrArCrArArUrArCrCrUrGrUrUrUrUrArG | 464 |
| AtoG | rAmGmCmUmAmGmAmAmAmUmAmGmCrArArGrUrUrArArArArUrAr | |
| | ArGrGrCrUrArGrUrCrCrGrUrUrArUrCmAmAmCmUmUmGmAmAmAm | |
| | AmAmGmUmGmGmCmAmCmCmGmAmGmUmCmGmGmUmGmCrGr | |
| | GrGrCrCrGrArGrGrUrArUrUrGrUrGrGrCrA*mG*mC*mA | |
| hPAH_NGG2_F12E9_ | mA*mC*mU*rUrUrGrCrUrGrCrCrArCrArArUrArCrCrUrGrUrUrUrUrArG | 465 |
| AtoG | rAmGmCmUmAmGmAmAmAmUmAmGmCrArArGrUrUrArArArArUrAr | |
| | ArGrGrCrUrArGrUrCrCrGrUrUrArUrCmAmAmCmUmUmGmAmAmAm | |
| | AmAmGmUmGmGmCmAmCmCmGmAmGmUmCmGmGmUmGmCrGr | |
| | GrGrCrCrGrArGrGrUrArUrUrGrUrGrGrC*mA*mG*mC | |
| hPAH_NGG2_F11E9_ | mA*mC*mU*rUrUrGrCrUrGrCrCrArCrArArUrArCrCrUrGrUrUrUrUrArG | 466 |
| AtoG | rAmGmCmUmAmGmAmAmAmUmAmGmCrArArGrUrUrArArArArUrAr | |
| | ArGrGrCrUrArGrUrCrCrGrUrUrArUrCmAmAmCmUmUmGmAmAmAm | |
| | AmAmGmUmGmGmCmAmCmCmGmAmGmUmCmGmGmUmGmCrGr | |
| | GrGrCrCrGrArGrGrUrArUrUrGrUrGrG*mC*mA*mG | |
| hPAH_NGG2_F10E9_ | mA*mC*mU*rUrUrGrCrUrGrCrCrArCrArArUrArCrCrUrGrUrUrUrUrArG | 467 |
| AtoG | rAmGmCmUmAmGmAmAmAmUmAmGmCrArArGrUrUrArArArArUrAr | |
| | ArGrGrCrUrArGrUrCrCrGrUrUrArUrCmAmAmCmUmUmGmAmAmAm | |
| | AmAmGmUmGmGmCmAmCmCmGmAmGmUmCmGmGmUmGmCrGr | |
| | GrGrCrCrGrArGrGrUrArUrUrGrUrG*mG*mC*mA | |
| hPAH_NGG2_F9E9_ | mA*mC*mU*rUrUrGrCrUrGrCrCrArCrArArUrArCrCrUrGrUrUrUrUrArG | 468 |
| AtoG | rAmGmCmUmAmGmAmAmAmUmAmGmCrArArGrUrUrArArArArUrAr | |
| | ArGrGrCrUrArGrUrCrCrGrUrUrArUrCmAmAmCmUmUmGmAmAmAm | |
| | AmAmGmUmGmGmCmAmCmCmGmAmGmUmCmGmGmUmGmCrGr | |
| | GrGrCrCrGrArGrGrUrArUrUrGrU*mG*mG*mC | |
| hPAH_NGG2_F8E9_ | mA*mC*mU*rUrUrGrCrUrGrCrCrArCrArArUrArCrCrUrGrUrUrUrUrArG | 469 |
| AtoG | rAmGmCmUmAmGmAmAmAmUmAmGmCrArArGrUrUrArArArArUrAr | |
| | ArGrGrCrUrArGrUrCrCrGrUrUrArUrCmAmAmCmUmUmGmAmAmAm | |
| | AmAmGmUmGmGmCmAmCmCmGmAmGmUmCmGmGmUmGmCrGr | |
| | GrGrCrCrGrArGrGrUrArUrUrG*mU*mG*mG | |
| hPAH_NGG2_F7E9_ | mA*mC*U*rUrUrGrCrUrGrCrCrArCrArArUrArCrCrUrGrUrUrUrUrArG | 470 |
| AtoG | rAmGmCmUmAmGmAmAmAmUmAmGmCrArArGrUrUrArArArArUrAr | |
| | ArGrGrCrUrArGrUrCrCrGrUrUrArUrCmAmAmCmUmUmGmAmAmAm | |
| | AmAmGmUmGmGmCmAmCmCmGmAmGmUmCmGmGmUmGmCrGr | |
| | GrGrCrCrGrArGrGrUrArUrU*mG*mU*mG | |
| hPAH_NGG2_F15E11_ | mA*mC*mU*rUrUrGrCrUrGrCrCrArCrArArUrArCrCrUrGrUrUrUrUrArG | 471 |
| AtoG | rAmGmCmUmAmGmAmAmAmUmAmGmCrArArGrUrUrArArArArUrAr | |
| | ArGrGrCrUrArGrUrCrCrGrUrUrArUrCmAmAmCmUmUmGmAmAmAm | |
| | AmAmGmUmGmGmCmAmCmCmGmAmGmUmCmGmGmUmGmCrAr | |
| | ArGrGrGrCrCrGrArGrGrUrArUrUrGrUrGrGrCrArGrC*mA*mA* | |
| | mA | |
| hPAH_NGG2_F14E11_ | mA*mC*mU*rUrUrGrCrUrGrCrCrArCrArArUrArCrCrUrGrUrUrUrUrArG | 472 |
| AtoG | rAmGmCmUmAmGmAmAmAmUmAmGmCrArArGrUrUrArArArArUrAr | |
| | ArGrGrCrUrArGrUrCrCrGrUrUrArUrCmAmAmCmUmUmGmAmAmAm | |
| | AmAmGmUmGmGmCmAmCmCmGmAmGmUmCmGmGmUmGmCrAr | |
| | ArGrGrGrCrCrGrArGrGrUrArUrUrGrUrGrGrCrArG*mC*mA*mA | |
| hPAH_NGG2_F13E11_ | mA*mC*mU*rUrUrGrCrUrGrCrCrArCrArArUrArCrCrUrGrUrUrUrUrArG | 473 |
| AtoG | rAmGmCmUmAmGmAmAmAmUmAmGmCrArArGrUrUrArArArArUrAr | |
| | ArGrGrCrUrArGrUrCrCrGrUrUrArUrCmAmAmCmUmUmGmAmAmAm | |
| | AmAmGmUmGmGmCmAmCmCmGmAmGmUmCmGmGmUmGmCrAr | |
| | ArGrGrGrCrCrGrArGrGrUrArUrUrGrUrGrGrCrA*mG*mC*mA | |
| hPAH_NGG2_F12E11_ | mA*mC*mU*rUrUrGrCrUrGrCrCrArCrArArUrArCrCrUrGrUrUrUrUrArG | 474 |
| AtoG | rAmGmCmUmAmGmAmAmAmUmAmGmCrArArGrUrUrArArArArUrAr | |
| | ArGrGrCrUrArGrUrCrCrGrUrUrArUrCmAmAmCmUmUmGmAmAmAm | |
| | AmAmGmUmGmGmCmAmCmCmGmAmGmUmCmGmGmUmGmCrAr | |
| | ArGrGrGrCrCrGrArGrGrUrArUrUrGrUrGrGrC*mA*mG*mC | |
| hPAH_NGG2_F11E11_ | mA*mC*mU*rUrUrGrCrUrGrCrCrArCrArArUrArCrCrUrGrUrUrUrUrArG | 475 |
| AtoG | rAmGmCmUmAmGmAmAmAmUmAmGmCrArArGrUrUrArArArArUrAr | |
| | ArGrGrCrUrArGrUrCrCrGrUrUrArUrCmAmAmCmUmUmGmAmAmAm | |
| | AmAmGmUmGmGmCmAmCmCmGmAmGmUmCmGmGmUmGmCrAr | |
| | ArGrGrGrCrCrGrArGrGrUrArUrUrGrUrGrG*mC*mA*mG | |
| hPAH_NGG2_F10E11_ | mA*mC*mU*rUrUrGrCrUrGrCrCrArCrArArUrArCrCrUrGrUrUrUrUrArG | 476 |
| AtoG | rAmGmCmUmAmGmAmAmAmUmAmGmCrArArGrUrUrArArArArUrAr | |
| | ArGrGrCrUrArGrUrCrCrGrUrUrArUrCmAmAmCmUmUmGmAmAmAm | |
| | AmAmGmUmGmGmCmAmCmCmGmAmGmUmCmGmGmUmGmCrAr | |
| | ArGrGrGrCrCrGrArGrGrUrArUrUrGrUrG*mG*mC*mA | |
| hPAH_NGG2_F9E11_ | mA*mC*mU*rUrUrGrCrUrGrCrCrArCrArArUrArCrCrUrGrUrUrUrUrArG | 477 |
| AtoG | rAmGmCmUmAmGmAmAmAmUmAmGmCrArArGrUrUrArArArArUrAr | |
| | ArGrGrCrUrArGrUrCrCrGrUrUrArUrCmAmAmCmUmUmGmAmAmAm | |
| | AmAmGmUmGmGmCmAmCmCmGmAmGmUmCmGmGmUmGmCrAr | |
| | ArGrGrGrCrCrGrArGrGrUrArUrUrGrU*mG*mG*mC | |
| hPAH_NGG2_F8E11_ | mA*mC*mU*rUrUrGrCrUrGrCrCrArCrArArUrArCrCrUrGrUrUrUrUrArG | 478 |
| AtoG | rAmGmCmUmAmGmAmAmAmUmAmGmCrArArGrUrUrArArArArUrAr | |
| | ArGrGrCrUrArGrUrCrCrGrUrUrArUrCmAmAmCmUmUmGmAmAmAm | |
| | AmAmGmUmGmGmCmAmCmCmGmAmGmUmCmGmGmUmGmCrAr | |
| | ArGrGrGrCrCrGrArGrGrUrArUrUrG*mU*mG*mG | |
| hPAH_NGG2_F7E11_ | mA*mC*mU*rUrUrGrCrUrGrCrCrArCrArArUrArCrCrUrGrUrUrUrUrArG | 479 |
| AtoG | rAmGmCmUmAmGmAmAmAmUmAmGmCrArArGrUrUrArArArArUrAr | |
| | ArGrGrCrUrArGrUrCrCrGrUrUrArUrCmAmAmCmUmUmGmAmAmAm | |
| | AmAmGmUmGmGmCmAmCmCmGmAmGmUmCmGmGmUmGmCrAr | |
| | ArGrGrGrCrCrGrArGrGrUrArUrU*mG*mU*mG | |
| hPAH_NGG2_F15E13_ | mA*mC*mU*rUrUrGrCrUrGrCrCrArCrArArUrArCrCrUrGrUrUrUrUrArG | 480 |
| AtoG | rAmGmCmUmAmGmAmAmAmUmAmGmCrArArGrUrUrArArArArUrAr | |
| | ArGrGrCrUrArGrUrCrCrGrUrUrArUrCmAmAmCmUmUmGmAmAmAm | |
| | AmAmGmUmGmGmCmAmCmCmGmAmGmUmCmGmGmUmGmCrAr | |
| | GrArArGrGrGrCrCrGrArGrGrUrArUrUrGrUrGrGrCrArGrC*mA* | |
| | mA*mA | |
| hPAH_NGG2_F14E13_ | mA*mC*mU*rUrUrGrCrUrGrCrCrArCrArArUrArCrCrUrGrUrUrUrUrAr | G481 |
| AtoG | rAmGmCmUmAmGmAmAmAmUmAmGmCrArArGrUrUrArArArArUrAr | |
| | ArGrGrCrUrArGrUrCrCrGrUrUrArUrCmAmAmCmUmUmGmAmAmAm | |
| | AmAmGmUmGmGmCmAmCmCmGmAmGmUmCmGmGmUmGmCrAr | |
| | GrArArGrGrGrCrCrGrArGrGrUrArUrUrGrUrGrGrCrArG*mC*m | |
| | A*mA | |
| hPAH_NGG2_F13E13_ | mA*mC*mU*rUrUrGrCrUrGrCrCrArCrArArUrArCrCrUrGrUrUrUrUrArG | 482 |
| AtoG | rAmGmCmUmAmGmAmAmAmUmAmGmCrArArGrUrUrArArArArUrAr | |
| | ArGrGrCrUrArGrUrCrCrGrUrUrArUrCmAmAmCmUmUmGmAmAmAm | |
| | AmAmGmUmGmGmCmAmCmCmGmAmGmUmCmGmGmUmGmCrAr | |
| | GrArArGrGrGrCrCrGrArGrGrUrArUrUrGrUrGrGrCrA*mG*mC* | |
| | mA | |
| hPAH_NGG2_F12E13_ | mA*mC*mU*rUrUrGrCrUrGrCrCrArCrArArUrArCrCrUrGrUrUrUrUrArG | 483 |
| AtoG | rAmGmCmUmAmGmAmAmAmUmAmGmCrArArGrUrUrArArArArUrAr | |
| | ArGrGrCrUrArGrUrCrCrGrUrUrArUrCmAmAmCmUmUmGmAmAmAm | |
| | AmAmGmUmGmGmCmAmCmCmGmAmGmUmCmGmGmUmGmCrAr | |
| | GrArArGrGrGrCrCrGrArGrGrUrArUrUrGrUrGrGrC*mA*mG*mC | |
| hPAH_NGG2_F11E13_ | mA*mC*mU*rUrUrGrCrUrGrCrCrArCrArArUrArCrCrUrGrUrUrUrUrArG | 484 |
| AtoG | rAmGmCmUmAmGmAmAmAmUmAmGmCrArArGrUrUrArArArArUrAr | |
| | ArGrGrCrUrArGrUrCrCrGrUrUrArUrCmAmAmCmUmUmGmAmAmAm | |
| | AmAmGmUmGmGmCmAmCmCmGmAmGmUmCmGmGmUmGmCrAr | |
| | GrArArGrGrGrCrCrGrArGrGrUrArUrUrGrUrGrG*mC*mA*mG | |
| hPAH_NGG2_F10E13_ | mA*mC*mU*rUrUrGrCrUrGrCrCrArCrArArUrArCrCrUrGrUrUrUrUrArG | 485 |
| AtoG | rAmGmCmUmAmGmAmAmAmUmAmGmCrArArGrUrUrArArArArUrAr | |
| | ArGrGrCrUrArGrUrCrCrGrUrUrArUrCmAmAmCmUmUmGmAmAmAm | |
| | AmAmGmUmGmGmCmAmCmCmGmAmGmUmCmGmGmUmGmCrAr | |
| | GrArArGrGrGrCrCrGrArGrGrUrArUrUrGrUrG*mG*mC*mA | |
| hPAH_NGG2_F9E13_ | mA*mC*mU*rUrUrGrCrUrGrCrCrArCrArArUrArCrCrUrGrUrUrUrUrArG | 486 |
| AtoG | rAmGmCmUmAmGmAmAmAmUmAmGmCrArArGrUrUrArArArArUrAr | |
| | ArGrGrCrUrArGrUrCrCrGrUrUrArUrCmAmAmCmUmUmGmAmAmAm | |
| | AmAmGmUmGmGmCmAmCmCmGmAmGmUmCmGmGmUmGmCrAr | |
| | GrArArGrGrGrCrCrGrArGrGrUrArUrUrGrU*mG*mG*mC | |
| hPAH_NGG2_F8E13_ | mA*mC*mU*rUrUrGrCrUrGrCrCrArCrArArUrArCrCrUrGrUrUrUrUrArG | 487 |
| AtoG | rAmGmCmUmAmGmAmAmAmUmAmGmCrArArGrUrUrArArArArUrAr | |
| | ArGrGrCrUrArGrUrCrCrGrUrUrArUrCmAmAmCmUmUmGmAmAmAm | |
| | AmAmGmUmGmGmCmAmCmCmGmAmGmUmCmGmGmUmGmCrAr | |
| | GrArArGrGrGrCrCrGrArGrGrUrArUrUrG*mU*mG*mG | |
| hPAH_NGG2_F7E13_ | mA*mC*mU*rUrUrGrCrUrGrCrCrArCrArArUrArCrCrUrGrUrUrUrUrArG | 488 |
| AtoG | rAmGmCmUmAmGmAmAmAmUmAmGmCrArArGrUrUrArArArArUrAr | |
| | ArGrGrCrUrArGrUrCrCrGrUrUrArUrCmAmAmCmUmUmGmAmAmAm | |
| | AmAmGmUmGmGmCmAmCmCmGmAmGmUmCmGmGmUmGmCrAr | |
| | GrArArGrGrGrCrCrGrArGrGrUrArUrU*mG*mU*mG | |
| hPAH_NGG2_F15E15_ | mA*mC*mU*rUrUrGrCrUrGrCrCrArCrArArUrArCrCrUrGrUrUrUrUrArG | 489 |
| AtoG | rAmGmCmUmAmGmAmAmAmUmAmGmCrArArGrUrUrArArArArUrAr | |
| | ArGrGrCrUrArGrUrCrCrGrUrUrArUrCmAmAmCmUmUmGmAmAmAm | |
| | AmAmGmUmGmGmCmAmCmCmGmAmGmUmCmGmGmUmGmCrUr | |
| | GrArGrArArGrGrGrCrCrGrArGrGrUrArUrUrGrUrGrGrCrArGrC | |
| | *mA*mA*mA | |
| hPAH_NGG2_F14E15_ | mA*mC*mU*rUrUrGrCrUrGrCrCrArCrArArUrArCrCrUrGrUrUrUrUrArG | 490 |
| AtoG | rAmGmCmUmAmGmAmAmAmUmAmGmCrArArGrUrUrArArArArUrAr | |
| | ArGrGrCrUrArGrUrCrCrGrUrUrArUrCmAmAmCmUmUmGmAmAmAm | |
| | AmAmGmUmGmGmCmAmCmCmGmAmGmUmCmGmGmUmGmCrUr | |
| | GrArGrArArGrGrGrCrCrGrArGrGrUrArUrUrGrUrGrGrCrArG*m | |
| | C*mA*mA | |
| hPAH_NGG2_F13E15_ | mA*mC*mU*rUrUrGrCrUrGrCrCrArCrArArUrArCrCrUrGrUrUrUrUrArG | 491 |
| AtoG | rAmGmCmUmAmGmAmAmAmUmAmGmCrArArGrUrUrArArArArUrAr | |
| | ArGrGrCrUrArGrUrCrCrGrUrUrArUrCmAmAmCmUmUmGmAmAmAm | |
| | AmAmGmUmGmGmCmAmCmCmGmAmGmUmCmGmGmUmGmCrUr | |
| | GrArGrArArGrGrGrCrCrGrArGrGrUrArUrUrGrUrGrGrCrA*mG* | |
| | mC*mA | |
| hPAH_NGG2_F12E15_ | mA*mC*mU*rUrUrGrCrUrGrCrCrArCrArArUrArCrCrUrGrUrUrUrUrArG | 492 |
| AtoG | rAmGmCmUmAmGmAmAmAmUmAmGmCrArArGrUrUrArArArArUrAr | |
| | ArGrGrCrUrArGrUrCrCrGrUrUrArUrCmAmAmCmUmUmGmAmAmAm | |
| | AmAmGmUmGmGmCmAmCmCmGmAmGmUmCmGmGmUmGmCrUr | |
| | GrArGrArArGrGrGrCrCrGrArGrGrUrArUrUrGrUrGrGrC*mA*m | |
| | G*mC | |
| hPAH_NGG2_F11E15_ | mA*mC*mU*rUrUrGrCrUrGrCrCrArCrArArUrArCrCrUrGrUrUrUrUrArG | 493 |
| AtoG | rAmGmCmUmAmGmAmAmAmUmAmGmCrArArGrUrUrArArArArUrAr | |
| | ArGrGrCrUrArGrUrCrCrGrUrUrArUrCmAmAmCmUmUmGmAmAmAm | |
| | AmAmGmUmGmGmCmAmCmCmGmAmGmUmCmGmGmUmGmCrUr | |
| | GrArGrArArGrGrGrCrCrGrArGrGrUrArUrUrGrUrGrG*mC*mA* | |
| | mG | |
| hPAH_NGG2_F10E15_ | mA*mC*mU*rUrUrGrCrUrGrCrCrArCrArArUrArCrCrUrGrUrUrUrUrArG | 494 |
| AtoG | rAmGmCmUmAmGmAmAmAmUmAmGmCrArArGrUrUrArArArArUrAr | |
| | ArGrGrCrUrArGrUrCrCrGrUrUrArUrCmAmAmCmUmUmGmAmAmAm | |
| | AmAmGmUmGmGmCmAmCmCmGmAmGmUmCmGmGmUmGmCrUr | |
| | GrArGrArArGrGrGrCrCrGrArGrGrUrArUrUrGrUrG*mG*mC*mA | |
| hPAH_NGG2_F9E15_ | mA*mC*mU*rUrUrGrCrUrGrCrCrArCrArArUrArCrCrUrGrUrUrUrUrArG | 495 |
| AtoG | rAmGmCmUmAmGmAmAmAmUmAmGmCrArArGrUrUrArArArArUrAr | |
| | ArGrGrCrUrArGrUrCrCrGrUrUrArUrCmAmAmCmUmUmGmAmAmAm | |
| | AmAmGmUmGmGmCmAmCmCmGmAmGmUmCmGmGmUmGmCrUr | |
| | GrArGrArArGrGrGrCrCrGrArGrGrUrArUrUrGrU*mG*mG*mC | |
| hPAH_NGG2_F8E15_ | mA*mC*mU*rUrUrGrCrUrGrCrCrArCrArArUrArCrCrUrGrUrUrUrUrArG | 496 |
| AtoG | rAmGmCmUmAmGmAmAmAmUmAmGmCrArArGrUrUrArArArArUrAr | |
| | ArGrGrCrUrArGrUrCrCrGrUrUrArUrCmAmAmCmUmUmGmAmAmAm | |
| | AmAmGmUmGmGmCmAmCmCmGmAmGmUmCmGmGmUmGmCrUr | |
| | GrArGrArArGrGrGrCrCrGrArGrGrUrArUrUrG*mU*mG*mG | |
| hPAH_NGG2_F7E15_ | mA*mC*mU*rUrUrGrCrUrGrCrCrArCrArArUrArCrCrUrGrUrUrUrUrArG | 497 |
| AtoG | rAmGmCmUmAmGmAmAmAmUmAmGmCrArArGrUrUrArArArArUrAr | |
| | ArGrGrCrUrArGrUrCrCrGrUrUrArUrCmAmAmCmUmUmGmAmAmAm | |
| | AmAmGmUmGmGmCmAmCmCmGmAmGmUmCmGmGmUmGmCrUr | |
| | GrArGrArArGrGrGrCrCrGrArGrGrUrArUrU*mG*mU*mG | |

¹For RNA, T is U; U are T in the sequence listing. For each entry, the spacer sequence is underlined and the extension arm is bold. The description indicates the length of the FBS (F) and ET (E) or homology region of the extension arm.
²For the sequences: *, phosphorothioate modification; mN, 2′O-methyl modification; rN, unmodified ribonucleotide; i2FN, Int Fluoro modification. N = A, C, T/U, G.

TABLE 12C
EXEMPLARY SPACER AND PROTOSPACER SEQUENCES FOR EDITING
PAH

| SEQ ID | | SEQ ID | |
|---|---|---|---|
| NO: | SPACER SEQUENCE¹ | NO: | PROTOSPACER SEQUENCE |
| 793 | UAGCGAACUGAGAAGGGCCA | 795 | TAGCGAACTGAGAAGGGCCA |
| 794 | ACUUUGCUGCCACAAUACCU | 796 | ACTTTGCTGCCACAATACCT |

¹For RNA, U are T in the sequence listing.

TABLE 12D
EXEMPLARY FLAP BINDING SEQUENCES AND TEMPLATES FOR
EDITING PAH

| DESCRIPTION | FBS¹ | SEQ ID NO: | EDITING TEMPLATE¹ | SEQ ID NO: |
|---|---|---|---|---|
| hPAH_NGG1_F15E6_TtoC | CCCUUCUCAGUUCGC | 803 | CCUCGG | |
| hPAH_NGG1_F14E6_TtoC | CCCUUCUCAGUUCG | 804 | CCUCGG | |
| hPAH_NGG1_F13E6_TtoC | CCCUUCUCAGUUC | 805 | CCUCGG | |
| hPAH_NGG1_F12E6_TtoC | CCCUUCUCAGUU | 806 | CCUCGG | |
| hPAH_NGG1_F11E6_TtoC | CCCUUCUCAGU | 807 | CCUCGG | |
| hPAH_NGG1_F10E6_TtoC | CCCUUCUCAG | 808 | CCUCGG | |
| hPAH_NGG1_F9E6_TtoC | CCCUUCUCA | | CCUCGG | |
| hPAH_NGG1_F8E6_TtoC | CCCUUCUC | | CCUCGG | |
| hPAH_NGG1_F7E6_TtoC | CCCUUCU | | CCUCGG | |
| hPAH_NGG1_F15E8_TtoC | CCCUUCUCAGUUCGC | 803 | UACCUCGG | |
| hPAH_NGG1_F14E8_TtoC | CCCUUCUCAGUUCG | 804 | UACCUCGG | |
| hPAH_NGG1_F13E8_TtoC | CCCUUCUCAGUUC | 805 | UACCUCGG | |
| hPAH_NGG1_F12E8_TtoC | CCCUUCUCAGUU | 806 | UACCUCGG | |
| hPAH_NGG1_F11E8_TtoC | CCCUUCUCAGU | 807 | UACCUCGG | |
| hPAH_NGG1_F10E8_TtoC | CCCUUCUCAG | 808 | UACCUCGG | |
| hPAH_NGG1_F9E8_TtoC | CCCUUCUCA | | UACCUCGG | |
| hPAH_NGG1_F8E8_TtoC | CCCUUCUC | | UACCUCGG | |
| hPAH_NGG1_F7E8_TtoC | CCCUUCU | | UACCUCGG | |
| hPAH_NGG1_F15E10_TtoC | CCCUUCUCAGUUCGC | 803 | AAUACCUCGG | 797 |
| hPAH_NGG1_F14E10_TtoC | CCCUUCUCAGUUCG | 804 | AAUACCUCGG | 797 |
| hPAH_NGG1_F13E10_TtoC | CCCUUCUCAGUUC | 805 | AAUACCUCGG | 797 |
| hPAH_NGG1_F12E10_TtoC | CCCUUCUCAGUU | 806 | AAUACCUCGG | 797 |
| hPAH_NGG1_F11E10_TtoC | CCCUUCUCAGU | 807 | AAUACCUCGG | 797 |
| hPAH_NGG1_F10E10_TtoC | CCCUUCUCAG | 808 | AAUACCUCGG | 797 |
| hPAH_NGG1_F9E10_TtoC | CCCUUCUCA | | AAUACCUCGG | 797 |
| hPAH_NGG1_F8E10_TtoC | CCCUUCUC | | AAUACCUCGG | 797 |
| hPAH_NGG1_F7E10_TtoC | CCCUUCU | | AAUACCUCGG | 797 |
| hPAH_NGG1_F14E12_TtoC | CCCUUCUCAGUUCG | 804 | ACAAUACCUCGG | 798 |
| hPAH_NGG1_F13E12_TtoC | CCCUUCUCAGUUC | 805 | ACAAUACCUCGG | 798 |
| hPAH_NGG1_F12E12_TtoC | CCCUUCUCAGUU | 806 | ACAAUACCUCGG | 798 |
| hPAH_NGG1_F11E12_TtoC | CCCUUCUCAGU | 807 | ACAAUACCUCGG | 798 |
| hPAH_NGG1_F10E12_TtoC | CCCUUCUCAG | 808 | ACAAUACCUCGG | 798 |
| hPAH_NGG1_F9E12_TtoC | CCCUUCUCA | | ACAAUACCUCGG | 798 |
| hPAH_NGG1_F8E12_TtoC | CCCUUCUC | | ACAAUACCUCGG | 798 |
| hPAH_NGG1_F7E12_TtoC | CCCUUCU | | ACAAUACCUCGG | 798 |
| hPAH_NGG1_F15E14_TtoC | CCCUUCUCAGUUCGC | 803 | CCACAAUACCUCGG | 799 |
| hPAH_NGG1_F14E14_TtoC | CCCUUCUCAGUUCG | 804 | CCACAAUACCUCGG | 799 |
| hPAH_NGG1_F13E14_TtoC | CCCUUCUCAGUUC | 805 | CCACAAUACCUCGG | 799 |
| hPAH_NGG1_F12E14_TtoC | CCCUUCUCAGUU | 806 | CCACAAUACCUCGG | 799 |
| hPAH_NGG1_F11E14_TtoC | CCCUUCUCAGU | 807 | CCACAAUACCUCGG | 799 |
| hPAH_NGG1_F10E14_TtoC | CCCUUCUCAG | 808 | CCACAAUACCUCGG | 799 |
| hPAH_NGG1_F9E14_TtoC | CCCUUCUCA | | CCACAAUACCUCGG | 799 |
| hPAH_NGG1_F8E14_TtoC | CCCUUCUC | | CCACAAUACCUCGG | 799 |
| hPAH_NGG1_F7E14_TtoC | CCCUUCU | | CCACAAUACCUCGG | 799 |
| hPAH_NGG2_F15E7_AtoG | UAUUGUGGCAGCAAA | 809 | GCCGAGG | |
| hPAH_NGG2_F14E7_AtoG | UAUUGUGGCAGCAA | 810 | GCCGAGG | |
| hPAH_NGG2_F13E7_AtoG | UAUUGUGGCAGCA | 811 | GCCGAGG | |
| hPAH_NGG2_F12E7_AtoG | UAUUGUGGCAGC | 812 | GCCGAGG | |
| hPAH_NGG2_F11E7_AtoG | UAUUGUGGCAG | 813 | GCCGAGG | |
| hPAH_NGG2_F10E7_AtoG | UAUUGUGGCA | 814 | GCCGAGG | |
| hPAH_NGG2_F9E7_AtoG | UAUUGUGGC | | GCCGAGG | |
| hPAH_NGG2_F8E7_AtoG | UAUUGUGG | | GCCGAGG | |
| hPAH_NGG2_F7E7_AtoG | UAUUGUG | | GCCGAGG | |
| hPAH_NGG2_F15E9_AtoG | UAUUGUGGCAGCAAA | 809 | GGGCCGAGG | |
| hPAH_NGG2_F14E9_AtoG | UAUUGUGGCAGCAA | 810 | GGGCCGAGG | |
| hPAH_NGG2_F13E9_AtoG | UAUUGUGGCAGCA | 811 | GGGCCGAGG | |
| hPAH_NGG2_F12E9_AtoG | UAUUGUGGCAGC | 812 | GGGCCGAGG | |
| hPAH_NGG2_F11E9_AtoG | UAUUGUGGCAG | 813 | GGGCCGAGG | |
| hPAH_NGG2_F10E9_AtoG | UAUUGUGGCA | 814 | GGGCCGAGG | |
| hPAH_NGG2_F9E9_AtoG | UAUUGUGGC | | GGGCCGAGG | |
| hPAH_NGG2_F8E9_AtoG | UAUUGUGG | | GGGCCGAGG | |
| hPAH_NGG2_F7E9_AtoG | UAUUGUG | | GGGCCGAGG | |
| hPAH_NGG2_F15E11_AtoG | UAUUGUGGCAGCAAA | 809 | AAGGGCCGAGG | 800 |
| hPAH_NGG2_F14E11_AtoG | UAUUGUGGCAGCAA | 810 | AAGGGCCGAGG | 800 |
| hPAH_NGG2_F13E11_AtoG | UAUUGUGGCAGCA | 811 | AAGGGCCGAGG | 800 |
| hPAH_NGG2_F12E11_AtoG | UAUUGUGGCAGC | 812 | AAGGGCCGAGG | 800 |
| hPAH_NGG2_F11E11_AtoG | UAUUGUGGCAG | 813 | AAGGGCCGAGG | 800 |
| hPAH_NGG2_F10E11_AtoG | UAUUGUGGCA | 814 | AAGGGCCGAGG | 800 |
| hPAH_NGG2_F9E11_AtoG | UAUUGUGGC | | AAGGGCCGAGG | 800 |
| hPAH_NGG2_F8E11_AtoG | UAUUGUGG | | AAGGGCCGAGG | 800 |
| hPAH_NGG2_F7E11_AtoG | UAUUGUG | | AAGGGCCGAGG | 800 |
| hPAH_NGG2_F15E13_AtoG | UAUUGUGGCAGCAAA | 809 | AGAAGGGCCGAGG | 801 |
| hPAH_NGG2_F14E13_AtoG | UAUUGUGGCAGCAA | 810 | AGAAGGGCCGAGG | 801 |
| hPAH_NGG2_F13E13_AtoG | UAUUGUGGCAGCA | 811 | AGAAGGGCCGAGG | 801 |
| hPAH_NGG2_F12E13_AtoG | UAUUGUGGCAGC | 812 | AGAAGGGCCGAGG | 801 |
| hPAH_NGG2_F11E13_AtoG | UAUUGUGGCAG | 813 | AGAAGGGCCGAGG | 801 |
| hPAH_NGG2_F10E13_AtoG | UAUUGUGGCA | 814 | AGAAGGGCCGAGG | 801 |
| hPAH_NGG2_F9E13_AtoG | UAUUGUGGC | | AGAAGGGCCGAGG | 801 |
| hPAH_NGG2_F8E13_AtoG | UAUUGUGG | | AGAAGGGCCGAGG | 801 |
| hPAH_NGG2_F7E13_AtoG | UAUUGUG | | AGAAGGGCCGAGG | 801 |
| hPAH_NGG2_F15E15_AtoG | UAUUGUGGCAGCAAA | 809 | UGAGAAGGGCCGAGG | 802 |
| hPAH_NGG2_F14E15_AtoG | UAUUGUGGCAGCAA | 810 | UGAGAAGGGCCGAGG | 802 |
| hPAH_NGG2_F13E15_AtoG | UAUUGUGGCAGCA | 811 | UGAGAAGGGCCGAGG | 802 |
| hPAH_NGG2_F12E15_AtoG | UAUUGUGGCAGC | 812 | UGAGAAGGGCCGAGG | 802 |
| hPAH_NGG2_F11E15_AtoG | UAUUGUGGCAG | 813 | UGAGAAGGGCCGAGG | 802 |
| hPAH_NGG2_F10E15_AtoG | UAUUGUGGCA | 814 | UGAGAAGGGCCGAGG | 802 |
| hPAH_NGG2_F9E15_AtoG | UAUUGUGGC | | UGAGAAGGGCCGAGG | 802 |
| hPAH_NGG2_F8E15_AtoG | UAUUGUGG | | UGAGAAGGGCCGAGG | 802 |
| hPAH_NGG2_F7E15_AtoG | UAUUGUG | | UGAGAAGGGCCGAGG | 802 |

¹For RNA, T is U; U are T in the sequence listing. The description indicates the length of the FBS (F) and ET (E) or homology region of the extension arm.

TABLE 12E
EXEMPLARY egRNA SEQUENCES FOR EDITING PAH

| NAME | SEQUENCE¹ | SEQ ID NO: |
|---|---|---|
| hPAH_egRNA_118038 | UUACACCUUACGAGGCCACUGUUUUAGAGCUAGAAAUAGCAAG | 498 |
| | UUAAAAUAAGGCUAGUCCGUUAUCAACUUGAAAAAGUGGCACC | |
| | GAGUCGGUGCUUUU | |
| hPAH_egRNA_118030 | UAAGUAAUUUACACCUUACGGUUUUAGAGCUAGAAAUAGCAAG | 499 |
| | UUAAAAUAAGGCUAGUCCGUUAUCAACUUGAAAAAGUGGCACC | |
| | GAGUCGGUGCUUUU | |
| hPAH_egRNA_117991 | UACCCAGCAGCUUAAGAUUUGUUUUAGAGCUAGAAAUAGCAAG | 500 |
| | UUAAAAUAAGGCUAGUCCGUUAUCAACUUGAAAAAGUGGCACC | |
| | GAGUCGGUGCUUUU | |
| hPAH_egRNA_117964 | CACCCAAAGGAUUGAGGUCUGUUUUAGAGCUAGAAAUAGCAAG | 501 |
| | UUAAAAUAAGGCUAGUCCGUUAUCAACUUGAAAAAGUGGCACC | |
| | GAGUCGGUGCUUUU | |
| hPAH_egRNA_117958 | CCCAUACACCCAAAGGAUUGGUUUUAGAGCUAGAAAUAGCAAG | 502 |
| | UUAAAAUAAGGCUAGUCCGUUAUCAACUUGAAAAAGUGGCACC | |
| | GAGUCGGUGCUUUU | |
| hPAH_egRNA_117951 | GCUACGACCCAUACACCCAAGUUUUAGAGCUAGAAAUAGCAAG | 503 |
| | UUAAAAUAAGGCUAGUCCGUUAUCAACUUGAAAAAGUGGCACC | |
| | GAGUCGGUGCUUUU | |
| hPAH_egRNA_117891 | AAGCCUGUGGUUUUGGUCUUGUUUUAGAGCUAGAAAUAGCAAG | 504 |
| | UUAAAAUAAGGCUAGUCCGUUAUCAACUUGAAAAAGUGGCACC | |
| | GAGUCGGUGCUUUU | |
| hPAH_egRNA_117884 | UUCACUCAAGCCUGUGGUUUGUUUUAGAGCUAGAAAUAGCAAG | 505 |
| | UUAAAAUAAGGCUAGUCCGUUAUCAACUUGAAAAAGUGGCACC | |
| | GAGUCGGUGCUUUU | |
| hPAH_egRNA_117878 | GUGCCCUUCACUCAAGCCUGGUUUUAGAGCUAGAAAUAGCAAG | 506 |
| | UUAAAAUAAGGCUAGUCCGUUAUCAACUUGAAAAAGUGGCACC | |
| | GAGUCGGUGCUUUU | |
| hPAH_egRNA_117856 | UAAGACUACCUUUCUCCAAAGUUUUAGAGCUAGAAAUAGCAAG | 507 |
| | UUAAAAUAAGGCUAGUCCGUUAUCAACUUGAAAAAGUGGCACC | |
| | GAGUCGGUGCUUUU | |
| hPAH_egRNA_117802 | UUACUUCUUUUUUAGGAACAGUUUUAGAGCUAGAAAUAGCAAG | 508 |
| | UUAAAAUAAGGCUAGUCCGUUAUCAACUUGAAAAAGUGGCACC | |
| | GAGUCGGUGCUUUU | |
| hPAH_egRNA_117927 | GGGUCGUAGCGAACUGAGAAGUUUUAGAGCUAGAAAUAGCAAG | 509 |
| | UUAAAAUAAGGCUAGUCCGUUAUCAACUUGAAAAAGUGGCACC | |
| | GAGUCGGUGCUUUU | |
| hPAH_egRNA_118009 | UGUAAAUUACUUACUGUUAAGUUUUAGAGCUAGAAAUAGCAAG | 510 |
| | UUAAAAUAAGGCUAGUCCGUUAUCAACUUGAAAAAGUGGCACC | |
| | GAGUCGGUGCUUUU | |
| hPAH_egRNA_117809 | UGGCAUUUUACUUCUUUUUUGUUUUAGAGCUAGAAAUAGCAAG | 511 |
| | UUAAAAUAAGGCUAGUCCGUUAUCAACUUGAAAAAGUGGCACC | |
| | GAGUCGGUGCUUUU | |
| hPAH_egRNA_117928 | UGGGUCGUAGCGAACUGAGAGUUUUAGAGCUAGAAAUAGCAAG | 512 |
| | UUAAAAUAAGGCUAGUCCGUUAUCAACUUGAAAAAGUGGCACC | |
| | GAGUCGGUGCUUUU | |
| hPAH_egRNA_118032 | AGAAACCGAGUGGCCUCGUAGUUUUAGAGCUAGAAAUAGCAAG | 513 |
| | UUAAAAUAAGGCUAGUCCGUUAUCAACUUGAAAAAGUGGCACC | |
| | GAGUCGGUGCUUUU | |
| hPAH_egRNA_117829 | AGUCUUAAGAGAGUUCUCAGGUUUUAGAGCUAGAAAUAGCAAG | 514 |
| | UUAAAAUAAGGCUAGUCCGUUAUCAACUUGAAAAAGUGGCACC | |
| | GAGUCGGUGCUUUU | |
| hPAH_egRNA_117947 | CCUCAAUCCUUUGGGUGUAUGUUUUAGAGCUAGAAAUAGCAAG | 515 |
| | UUAAAAUAAGGCUAGUCCGUUAUCAACUUGAAAAAGUGGCACC | |
| | GAGUCGGUGCUUUU | |
| hPAH_egRNA_118042 | UCGAUUACUGAGAAACCGAGGUUUUAGAGCUAGAAAUAGCAAG | 516 |
| | UUAAAAUAAGGCUAGUCCGUUAUCAACUUGAAAAAGUGGCACC | |
| | GAGUCGGUGCUUUU | |
| hPAH_egRNA_117853 | GAAGGGCACCAUUUGGAGAAGUUUUAGAGCUAGAAAUAGCAAG | 517 |
| | UUAAAAUAAGGCUAGUCCGUUAUCAACUUGAAAAAGUGGCACC | |
| | GAGUCGGUGCUUUU | |
| hPAH_egRNA_117948 | ACCUCAAUCCUUUGGGUGUAGUUUUAGAGCUAGAAAUAGCAAG | 518 |
| | UUAAAAUAAGGCUAGUCCGUUAUCAACUUGAAAAAGUGGCACC | |
| | GAGUCGGUGCUUUU | |
| hPAH_egRNA_117860 | CUUGAGUGAAGGGCACCAUUGUUUUAGAGCUAGAAAUAGCAAG | 519 |
| | UUAAAAUAAGGCUAGUCCGUUAUCAACUUGAAAAAGUGGCACC | |
| | GAGUCGGUGCUUUU | |
| hPAH_egRNA_117955 | GUCCAAGACCUCAAUCCUUUGUUUUAGAGCUAGAAAUAGCAAG | 520 |
| | UUAAAAUAAGGCUAGUCCGUUAUCAACUUGAAAAAGUGGCACC | |
| | GAGUCGGUGCUUUU | |
| hPAH_egRNA_117870 | AAACCACAGGCUUGAGUGAAGUUUUAGAGCUAGAAAUAGCAAG | 521 |
| | UUAAAAUAAGGCUAGUCCGUUAUCAACUUGAAAAAGUGGCACC | |
| | GAGUCGGUGCUUUU | |
| hPAH_egRNA_117956 | UGUCCAAGACCUCAAUCCUUGUUUUAGAGCUAGAAAUAGCAAG | 522 |
| | UUAAAAUAAGGCUAGUCCGUUAUCAACUUGAAAAAGUGGCACC | |
| | GAGUCGGUGCUUUU | |
| hPAH_egRNA_117871 | AAAACCACAGGCUUGAGUGAGUUUUAGAGCUAGAAAUAGCAAG | 523 |
| | UUAAAAUAAGGCUAGUCCGUUAUCAACUUGAAAAAGUGGCACC | |
| | GAGUCGGUGCUUUU | |
| hPAH_egRNA_117982 | AGCCAAAAUCUUAAGCUGCUGUUUUAGAGCUAGAAAUAGCAAG | 524 |
| | UUAAAAUAAGGCUAGUCCGUUAUCAACUUGAAAAAGUGGCACC | |
| | GAGUCGGUGCUUUU | |
| hPAH_egRNA_117883 | GUUCCUAAGACCAAAACCACGUUUUAGAGCUAGAAAUAGCAAG | 525 |
| | UUAAAAUAAGGCUAGUCCGUUAUCAACUUGAAAAAGUGGCACC | |
| | GAGUCGGUGCUUUU | |
| hPAH_egRNA_117983 | CAGCCAAAAUCUUAAGCUGCGUUUUAGAGCUAGAAAUAGCAAG | 526 |
| | UUAAAAUAAGGCUAGUCCGUUAUCAACUUGAAAAAGUGGCACC | |
| | GAGUCGGUGCUUUU | |

¹For RNA, Tis U; U are T in the sequence listing. For each entry, the spacer sequence is underlined.

TABLE 12F
EXEMPLARY MODIFIED egRNA SEQUENCES FOR EDITING PAH

| NAME | SEQUENCE^{1,2} | SEQ ID NO: |
|---|---|---|
| hPAH_egRNA_118038 | mU*mU*mA*rCrArCrCrUrUrArCrGrArGrGrCrCrArCrUrGrUrUrUrUrArG | 527 |
| | rAmGmCmUmAmGmAmAmAmUmAmGmCrArArGrUrUrArArArArUrAr | |
| | ArGrGrCrUrArGrUrCrCrGrUrUrArUrCmAmAmCmUmUmGmAmAmAm | |
| | AmAmGmUmGmGmCmAmCmCmGmAmGmUmCmGmGmUmGmCmU* | |
| | mU*mU*mU | |
| hPAH_egRNA_118030 | mU*mA*mA*rGrUrArArUrUrUrArCrArCrCrUrUrArCrGrGrUrUrUrUrAr | 528 |
| | GrAmGmCmUmAmGmAmAmAmUmAmGmCrArArGrUrUrArArArArUr | |
| | ArArGrGrCrUrArGrUrCrCrGrUrUrArUrCmAmAmCmUmUmGmAmAmA | |
| | mAmAmGmUmGmGmCmAmCmCmGmAmGmUmCmGmGmUmGmCm | |
| | U*mU*mU*mU | |
| hPAH_egRNA_117991 | mU*mA*mC*rCrCrArGrCrArGrCrUrUrArArGrArUrUrUrGrUrUrUrUrAr | 529 |
| | GrAmGmCmUmAmGmAmAmAmUmAmGmCrArArGrUrUrArArArArUr | |
| | ArArGrGrCrUrArGrUrCrCrGrUrUrArUrCmAmAmCmUmUmGmAmAmA | |
| | mAmAmGmUmGmGmCmAmCmCmGmAmGmUmCmGmGmUmGmCm | |
| | U*mU*mU*mU | |
| hPAH_egRNA_117964 | mC*mA*mC*rCrCrArArArGrGrArUrUrGrArGrGrUrCrUrGrUrUrUrUrAr | 530 |
| | GrAmGmCmUmAmGmAmAmAmUmAmGmCrArArGrUrUrArArArArUr | |
| | ArArGrGrCrUrArGrUrCrCrGrUrUrArUrCmAmAmCmUmUmGmAmAmA | |
| | mAmAmGmUmGmGmCmAmCmCmGmAmGmUmCmGmGmUmGmCm | |
| | U*mU*mU*mU | |
| hPAH_egRNA_117958 | mC*mC*mC*rArUrArCrArCrCrCrArArArGrGrArUrUrGrGrUrUrUrUrArG | 531 |
| | rAmGmCmUmAmGmAmAmAmUmAmGmCrArArGrUrUrArArArArUrAr | |
| | ArGrGrCrUrArGrUrCrCrGrUrUrArUrCmAmAmCmUmUmGmAmAmAm | |
| | AmAmGmUmGmGmCmAmCmCmGmAmGmUmCmGmGmUmGmCmU* | |
| | mU*mU*mU | |
| hPAH_egRNA_117951 | mG*mC*mU*rArCrGrArCrCrCrArUrArCrArCrCrCrArArGrUrUrUrUrArG | 532 |
| | rAmGmCmUmAmGmAmAmAmUmAmGmCrArArGrUrUrArArArArUrAr | |
| | ArGrGrCrUrArGrUrCrCrGrUrUrArUrCmAmAmCmUmUmGmAmAmAm | |
| | AmAmGmUmGmGmCmAmCmCmGmAmGmUmCmGmGmUmGmCmU* | |
| | mU*mU*mU | |
| hPAH_egRNA_117891 | mA*mA*mG*rCrCrUrGrUrGrGrUrUrUrUrGrGrUrCrUrUrGrUrUrUrUrAr | 533 |
| | GrAmGmCmUmAmGmAmAmAmUmAmGmCrArArGrUrUrArArArArUr | |
| | ArArGrGrCrUrArGrUrCrCrGrUrUrArUrCmAmAmCmUmUmGmAmAmA | |
| | mAmAmGmUmGmGmCmAmCmCmGmAmGmUmCmGmGmUmGmCm | |
| | U*mU*mU*mU | |
| hPAH_egRNA_117884 | mU*mU*mC*rArCrUrCrArArGrCrCrUrGrUrGrGrUrUrUrGrUrUrUrUrAr | 534 |
| | GrAmGmCmUmAmGmAmAmAmUmAmGmCrArArGrUrUrArArArArUr | |
| | ArArGrGrCrUrArGrUrCrCrGrUrUrArUrCmAmAmCmUmUmGmAmAmA | |
| | mAmAmGmUmGmGmCmAmCmCmGmAmGmUmCmGmGmUmGmCm | |
| | U*mU*mU*mU | |
| hPAH_egRNA_117878 | mG*mU*mG*rCrCrCrUrUrCrArCrUrCrArArGrCrCrUrGrGrUrUrUrUrArG | 535 |
| | rAmGmCmUmAmGmAmAmAmUmAmGmCrArArGrUrUrArArArArUrAr | |
| | ArGrGrCrUrArGrUrCrCrGrUrUrArUrCmAmAmCmUmUmGmAmAmAm | |
| | AmAmGmUmGmGmCmAmCmCmGmAmGmUmCmGmGmUmGmCmU* | |
| | mU*mU*mU | |
| hPAH_egRNA_117856 | mU*mA*mA*rGrArCrUrArCrCrUrUrUrCrUrCrCrArArArGrUrUrUrUrAr | 536 |
| | GrAmGmCmUmAmGmAmAmAmUmAmGmCrArArGrUrUrArArArArUr | |
| | ArArGrGrCrUrArGrUrCrCrGrUrUrArUrCmAmAmCmUmUmGmAmAmA | |
| | mAmAmGmUmGmGmCmAmCmCmGmAmGmUmCmGmGmUmGmCm | |
| | U*mU*mU*mU | |
| hPAH_egRNA_117802 | mU*mU*mA*rCrUrUrCrUrUrUrUrUrUrArGrGrArArCrArGrUrUrUrUrAr | 537 |
| | GrAmGmCmUmAmGmAmAmAmUmAmGmCrArArGrUrUrArArArArUr | |
| | ArArGrGrCrUrArGrUrCrCrGrUrUrArUrCmAmAmCmUmUmGmAmAmA | |
| | mAmAmGmUmGmGmCmAmCmCmGmAmGmUmCmGmGmUmGmCm | |
| | U*mU*mU*mU | |
| hPAH_egRNA_117927 | mG*mG*mG*rUrCrGrUrArGrCrGrArArCrUrGrArGrArArGrUrUrUrUrAr | 538 |
| | GrAmGmCmUmAmGmAmAmAmUmAmGmCrArArGrUrUrArArArArUr | |
| | ArArGrGrCrUrArGrUrCrCrGrUrUrArUrCmAmAmCmUmUmGmAmAmA | |
| | mAmAmGmUmGmGmCmAmCmCmGmAmGmUmCmGmGmUmGmCm | |
| | U*mU*mU*mU | |
| hPAH_egRNA_118009 | mU*mG*mU*rArArArUrUrArCrUrUrArCrUrGrUrUrArArGrUrUrUrUrAr | 539 |
| | GrAmGmCmUmAmGmAmAmAmUmAmGmCrArArGrUrUrArArArArUr | |
| | ArArGrGrCrUrArGrUrCrCrGrUrUrArUrCmAmAmCmUmUmGmAmAmA | |
| | mAmAmGmUmGmGmCmAmCmCmGmAmGmUmCmGmGmUmGmCm | |
| | U*mU*mU*mU | |
| hPAH_egRNA_117809 | mU*mG*mG*rCrArUrUrUrUrArCrUrUrCrUrUrUrUrUrUrGrUrUrUrUrAr | 540 |
| | GrAmGmCmUmAmGmAmAmAmUmAmGmCrArArGrUrUrArArArArUr | |
| | ArArGrGrCrUrArGrUrCrCrGrUrUrArUrCmAmAmCmUmUmGmAmAmA | |
| | mAmAmGmUmGmGmCmAmCmCmGmAmGmUmCmGmGmUmGmCm | |
| | U*mU*mU*mU | |
| hPAH_egRNA_117928 | mU*mG*mG*rGrUrCrGrUrArGrCrGrArArCrUrGrArGrArGrUrUrUrUrAr | 541 |
| | GrAmGmCmUmAmGmAmAmAmUmAmGmCrArArGrUrUrArArArArUr | |
| | ArArGrGrCrUrArGrUrCrCrGrUrUrArUrCmAmAmCmUmUmGmAmAmA | |
| | mAmAmGmUmGmGmCmAmCmCmGmAmGmUmCmGmGmUmGmCm | |
| | U*mU*mU*mU | |
| hPAH_egRNA_118032 | mA*mG*mA*rArArCrCrGrArGrUrGrGrCrCrUrCrGrUrArGrUrUrUrUrAr | 542 |
| | GrAmGmCmUmAmGmAmAmAmUmAmGmCrArArGrUrUrArArArArUr | |
| | ArArGrGrCrUrArGrUrCrCrGrUrUrArUrCmAmAmCmUmUmGmAmAmA | |
| | mAmAmGmUmGmGmCmAmCmCmGmAmGmUmCmGmGmUmGmCm | |
| | U*mU*mU*mU | |
| hPAH_egRNA_117829 | mA*mG*mU*rCrUrUrArArGrArGrArGrUrUrCrUrCrArGrGrUrUrUrUrAr | 543 |
| | GrAmGmCmUmAmGmAmAmAmUmAmGmCrArArGrUrUrArArArArUr | |
| | ArArGrGrCrUrArGrUrCrCrGrUrUrArUrCmAmAmCmUmUmGmAmAmA | |
| | mAmAmGmUmGmGmCmAmCmCmGmAmGmUmCmGmGmUmGmCm | |
| | U*mU*mU*mU | |
| hPAH_egRNA_117947 | mC*mC*mU*rCrArArUrCrCrUrUrUrGrGrGrUrGrUrArUrGrUrUrUrUrAr | 544 |
| | GrAmGmCmUmAmGmAmAmAmUmAmGmCrArArGrUrUrArArArArUr | |
| | ArArGrGrCrUrArGrUrCrCrGrUrUrArUrCmAmAmCmUmUmGmAmAmA | |
| | mAmAmGmUmGmGmCmAmCmCmGmAmGmUmCmGmGmUmGmCm | |
| | U*mU*mU*mU | |
| hPAH_egRNA_118042 | mU*mC*mG*rArUrUrArCrUrGrArGrArArArCrCrGrArGrGrUrUrUrUrAr | 545 |
| | GrAmGmCmUmAmGmAmAmAmUmAmGmCrArArGrUrUrArArArArUr | |
| | ArArGrGrCrUrArGrUrCrCrGrUrUrArUrCmAmAmCmUmUmGmAmAmA | |
| | mAmAmGmUmGmGmCmAmCmCmGmAmGmUmCmGmGmUmGmCm | |
| | U*mU*mU*mU | |
| hPAH_egRNA_117853 | mG*mA*mA*rGrGrGrCrArCrCrArUrUrUrGrGrArGrArArGrUrUrUrUrAr | 546 |
| | GrAmGmCmUmAmGmAmAmAmUmAmGmCrArArGrUrUrArArArArUr | |
| | ArArGrGrCrUrArGrUrCrCrGrUrUrArUrCmAmAmCmUmUmGmAmAmA | |
| | mAmAmGmUmGmGmCmAmCmCmGmAmGmUmCmGmGmUmGmCm | |
| | U*mU*mU*mU | |
| hPAH_egRNA_117948 | mA*mC*mC*rUrCrArArUrCrCrUrUrUrGrGrGrUrGrUrArGrUrUrUrUrAr | 547 |
| | GrAmGmCmUmAmGmAmAmAmUmAmGmCrArArGrUrUrArArArArUr | |
| | ArArGrGrCrUrArGrUrCrCrGrUrUrArUrCmAmAmCmUmUmGmAmAmA | |
| | mAmAmGmUmGmGmCmAmCmCmGmAmGmUmCmGmGmUmGmCm | |
| | U*mU*mU*mU | |
| hPAH_egRNA_117850 | mC*mU*mU*rGrArGrUrGrArArGrGrGrCrArCrCrArUrUrGrUrUrUrUrAr | 548 |
| | GrAmGmCmUmAmGmAmAmAmUmAmGmCrArArGrUrUrArArArArUr | |
| | ArArGrGrCrUrArGrUrCrCrGrUrUrArUrCmAmAmCmUmUmGmAmAmA | |
| | mAmAmGmUmGmGmCmAmCmCmGmAmGmUmCmGmGmUmGmCm | |
| | U*mU*mU*mU | |
| hPAH_egRNA_117955 | mG*mU*mC*rCrArArGrArCrCrUrCrArArUrCrCrUrUrUrGrUrUrUrUrArG | 549 |
| | rAmGmCmUmAmGmAmAmAmUmAmGmCrArArGrUrUrArArArArUrAr | |
| | ArGrGrCrUrArGrUrCrCrGrUrUrArUrCmAmAmCmUmUmGmAmAmAm | |
| | AmAmGmUmGmGmCmAmCmCmGmAmGmUmCmGmGmUmGmCmU* | |
| | mU*mU*mU | |
| hPAH_egRNA_117870 | mA*mA*mA*rCrCrArCrArGrGrCrUrUrGrArGrUrGrArArGrUrUrUrUrAr | 550 |
| | GrAmGmCmUmAmGmAmAmAmUmAmGmCrArArGrUrUrArArArArUr | |
| | ArArGrGrCrUrArGrUrCrCrGrUrUrArUrCmAmAmCmUmUmGmAmAmA | |
| | mAmAmGmUmGmGmCmAmCmCmGmAmGmUmCmGmGmUmGmCm | |
| | U*mU*mU*mU | |
| hPAH_egRNA_117956 | mU*mG*mU*rCrCrArArGrArCrCrUrCrArArUrCrCrUrUrGrUrUrUrUrArG | 551 |
| | rAmGmCmUmAmGmAmAmAmUmAmGmCrArArGrUrUrArArArArUrAr | |
| | ArGrGrCrUrArGrUrCrCrGrUrUrArUrCmAmAmCmUmUmGmAmAmAm | |
| | AmAmGmUmGmGmCmAmCmCmGmAmGmUmCmGmGmUmGmCmU* | |
| | mU*mU*mU | |
| hPAH_egRNA_117871 | mA*mA*mA*rArCrCrArCrArGrGrCrUrUrGrArGrUrGrArGrUrUrUrUrAr | 552 |
| | GrAmGmCmUmAmGmAmAmAmUmAmGmCrArArGrUrUrArArArArUr | |
| | ArArGrGrCrUrArGrUrCrCrGrUrUrArUrCmAmAmCmUmUmGmAmAmA | |
| | mAmAmGmUmGmGmCmAmCmCmGmAmGmUmCmGmGmUmGmCm | |
| | U*mU*mU*mU | |
| hPAH_egRNA_117982 | mA*mG*mC*rCrArArArArUrCrUrUrArArGrCrUrGrCrUrGrUrUrUrUrAr | 553 |
| | GrAmGmCmUmAmGmAmAmAmUmAmGmCrArArGrUrUrArArArArUr | |
| | ArArGrGrCrUrArGrUrCrCrGrUrUrArUrCmAmAmCmUmUmGmAmAmA | |
| | mAmAmGmUmGmGmCmAmCmCmGmAmGmUmCmGmGmUmGmCm | |
| | U*mU*mU*mU | |
| hPAH_egRNA_117883 | mG*mU*mU*rCrCrUrArArGrArCrCrArArArArCrCrArCrGrUrUrUrUrArG | 554 |
| | rAmGmCmUmAmGmAmAmAmUmAmGmCrArArGrUrUrArArArArUrAr | |
| | ArGrGrCrUrArGrUrCrCrGrUrUrArUrCmAmAmCmUmUmGmAmAmAm | |
| | AmAmGmUmGmGmCmAmCmCmGmAmGmUmCmGmGmUmGmCmU* | |
| | mU*mU*mU | |
| hPAH_egRNA_117983 | mC*mA*mG*rCrCrArArArArUrCrUrUrArArGrCrUrGrCrGrUrUrUrUrAr | 555 |
| | GrAmGmCmUmAmGmAmAmAmUmAmGmCrArArGrUrUrArArArArUr | |
| | ArArGrGrCrUrArGrUrCrCrGrUrUrArUrCmAmAmCmUmUmGmAmAmA | |
| | mAmAmGmUmGmGmCmAmCmCmGmAmGmUmCmGmGmUmGmCm | |
| | U*mU*mU*mU | |

¹For RNA, T is U; U are T in the sequence listing. For each entry, the spacer sequence is underlined.
²For the sequences: *, phosphorothioate modification; mN, 2′O-methyl modification; rN, unmodified ribonucleotide; i2FN, Int Fluoro modification. N = A, C, T/U, G.

TABLE 12G
EXEMPLARY egRNA SPACER AND PROTOSPACER SEQUENCES FOR
EDITING PAH

| SEQ ID NO: | SPACER SEQUENCE¹ | SEQ ID NO: | PROTOSPACER SEQUENCE |
|---|---|---|---|
| 831 | UUACACCUUACGAGGCCACU | 860 | TTACACCTTACGAGGCCACT |
| 832 | UAAGUAAUUUACACCUUACG | 861 | TAAGTAATTTACACCTTACG |
| 833 | UACCCAGCAGCUUAAGAUUU | 862 | TACCCAGCAGCTTAAGATTT |
| 834 | CACCCAAAGGAUUGAGGUCU | 863 | CACCCAAAGGATTGAGGTCT |
| 835 | CCCAUACACCCAAAGGAUUG | 864 | CCCATACACCCAAAGGATTG |
| 836 | GCUACGACCCAUACACCCAA | 865 | GCTACGACCCATACACCCAA |
| 837 | AAGCCUGUGGUUUUGGUCUU | 866 | AAGCCTGTGGTTTTGGTCTT |
| 838 | UUCACUCAAGCCUGUGGUUU | 867 | TTCACTCAAGCCTGTGGTTT |
| 839 | GUGCCCUUCACUCAAGCCUG | 868 | GTGCCCTTCACTCAAGCCTG |
| 840 | UAAGACUACCUUUCUCCAAA | 869 | TAAGACTACCTTTCTCCAAA |
| 841 | UUACUUCUUUUUUAGGAACA | 870 | TTACTTCTTTTTTAGGAACA |
| 842 | GGGUCGUAGCGAACUGAGAA | 871 | GGGTCGTAGCGAACTGAGAA |
| 843 | UGUAAAUUACUUACUGUUAA | 872 | TGTAAATTACTTACTGTTAA |
| 844 | UGGCAUUUUACUUCUUUUUU | 873 | TGGCATTTTACTTCTTTTTT |
| 845 | UGGGUCGUAGCGAACUGAGA | 874 | TGGGTCGTAGCGAACTGAGA |
| 846 | AGAAACCGAGUGGCCUCGUA | 875 | AGAAACCGAGTGGCCTCGTA |
| 847 | AGUCUUAAGAGAGUUCUCAG | 876 | AGTCTTAAGAGAGTTCTCAG |
| 848 | CCUCAAUCCUUUGGGUGUAU | 877 | CCTCAATCCTTTGGGTGTAT |
| 849 | UCGAUUACUGAGAAACCGAG | 878 | TCGATTACTGAGAAACCGAG |
| 850 | GAAGGGCACCAUUUGGAGAA | 879 | GAAGGGCACCATTTGGAGAA |
| 851 | ACCUCAAUCCUUUGGGUGUA | 880 | ACCTCAATCCTTTGGGTGTA |
| 852 | CUUGAGUGAAGGGCACCAUU | 881 | CTTGAGTGAAGGGCACCATT |
| 853 | GUCCAAGACCUCAAUCCUUU | 882 | GTCCAAGACCTCAATCCTTT |
| 854 | AAACCACAGGCUUGAGUGAA | 883 | AAACCACAGGCTTGAGTGAA |
| 855 | UGUCCAAGACCUCAAUCCUU | 884 | TGTCCAAGACCTCAATCCTT |
| 856 | AAAACCACAGGCUUGAGUGA | 885 | AAAACCACAGGCTTGAGTGA |
| 857 | AGCCAAAAUCUUAAGCUGCU | 886 | AGCCAAAATCTTAAGCTGCT |
| 858 | GUUCCUAAGACCAAAACCAC | 887 | GTTCCTAAGACCAAAACCAC |
| 859 | CAGCCAAAAUCUUAAGCUGC | 888 | CAGCCAAAATCTTAAGCTGC |

¹For RNA, U are T in the sequence listing.

TABLE 13A
EXEMPLARY tagRNA SEQUENCES FOR EDITING SERPINA1

| NAME | SEQUENCE¹ | SEQ ID NO: |
|---|---|---|
| N20_NNAGAAA_+5_ | AAGGCUGUGCUGACCAUCGAGUUUUUGUACUCUCAAGAAAUUG | 563 |
| S_F12E8_TtoC | CAGAAGCUACAAAGAUAAGGCUUCAUGCCGAAAUCAACACCCU | |
| | GUCAUUUUAUGGCAGGGUGUUUCUCGUCGAUGGUCAGCACA | |
| N20_NNAGAAA_+5_ | AAGGCUGUGCUGACCAUCGAGUUUUUGUACUCUCAAGAAAUUG | 564 |
| S_F11E8_TtoC | CAGAAGCUACAAAGAUAAGGCUUCAUGCCGAAAUCAACACCCU | |
| | GUCAUUUUAUGGCAGGGUGUUUCUCGUCGAUGGUCAGCAC | |
| N20_NNAGAAA_+5_ | AAGGCUGUGCUGACCAUCGAGUUUUUGUACUCUCAAGAAAUUG | 565 |
| S_F10E8_TtoC | CAGAAGCUACAAAGAUAAGGCUUCAUGCCGAAAUCAACACCCU | |
| | GUCAUUUUAUGGCAGGGUGUUUCUCGUCGAUGGUCAGCA | |
| N20_NNAGAAA_+5_ | AAGGCUGUGCUGACCAUCGAGUUUUUGUACUCUCAAGAAAUUG | 566 |
| S_F9E8_TtoC | CAGAAGCUACAAAGAUAAGGCUUCAUGCCGAAAUCAACACCCU | |
| | GUCAUUUUAUGGCAGGGUGUUUCUCGUCGAUGGUCAGC | |
| N20_NNAGAAA_+5_ | AAGGCUGUGCUGACCAUCGAGUUUUUGUACUCUCAAGAAAUUG | 567 |
| S_F8E8_TtoC | CAGAAGCUACAAAGAUAAGGCUUCAUGCCGAAAUCAACACCCU | |
| | GUCAUUUUAUGGCAGGGUGUUUCUCGUCGAUGGUCAG | |
| N20_NNAGAAA_+5_ | AAGGCUGUGCUGACCAUCGAGUUUUUGUACUCUCAAGAAAUUG | 568 |
| S_F7E8_TtoC | CAGAAGCUACAAAGAUAAGGCUUCAUGCCGAAAUCAACACCCU | |
| | GUCAUUUUAUGGCAGGGUGUUUCUCGUCGAUGGUCA | |
| N20_NNAGAAA_+5_ | AAGGCUGUGCUGACCAUCGAGUUUUUGUACUCUCAAGAAAUUG | 569 |
| S_F12E10_TtoC | CAGAAGCUACAAAGAUAAGGCUUCAUGCCGAAAUCAACACCCU | |
| | GUCAUUUUAUGGCAGGGUGUUUUUCUCGUCGAUGGUCAGCAC | |
| | A | |
| N20_NNAGAAA_+5_ | AAGGCUGUGCUGACCAUCGAGUUUUUGUACUCUCAAGAAAUUG | 570 |
| S_F11E10_TtoC | CAGAAGCUACAAAGAUAAGGCUUCAUGCCGAAAUCAACACCCU | |
| | GUCAUUUUAUGGCAGGGUGUUUUUCUCGUCGAUGGUCAGCAC | |
| N20_NNAGAAA_+5_ | AAGGCUGUGCUGACCAUCGAGUUUUUGUACUCUCAAGAAAUUG | 571 |
| S_F10E10_TtoC | CAGAAGCUACAAAGAUAAGGCUUCAUGCCGAAAUCAACACCCU | |
| | GUCAUUUUAUGGCAGGGUGUUUUUCUCGUCGAUGGUCAGCA | |
| N20_NNAGAAA_+5_ | AAGGCUGUGCUGACCAUCGAGUUUUUGUACUCUCAAGAAAUUG | 572 |
| S_F9E10_TtoC | CAGAAGCUACAAAGAUAAGGCUUCAUGCCGAAAUCAACACCCU | |
| | GUCAUUUUAUGGCAGGGUGUUUUUCUCGUCGAUGGUCAGC | |
| N20_NNAGAAA_+5_ | AAGGCUGUGCUGACCAUCGAGUUUUUGUACUCUCAAGAAAUUG | 573 |
| S_F8E10_TtoC | CAGAAGCUACAAAGAUAAGGCUUCAUGCCGAAAUCAACACCCU | |
| | GUCAUUUUAUGGCAGGGUGUUUUUCUCGUCGAUGGUCAG | |
| N20_NNAGAAA_+5_ | AAGGCUGUGCUGACCAUCGAGUUUUUGUACUCUCAAGAAAUUG | 574 |
| S_F7E10_TtoC | CAGAAGCUACAAAGAUAAGGCUUCAUGCCGAAAUCAACACCCU | |
| | GUCAUUUUAUGGCAGGGUGUUUUUCUCGUCGAUGGUCA | |
| N20_NNAGAAA_+5_ | AAGGCUGUGCUGACCAUCGAGUUUUUGUACUCUCAAGAAAUUG | 575 |
| S_F12E12_TtoC | CAGAAGCUACAAAGAUAAGGCUUCAUGCCGAAAUCAACACCCU | |
| | GUCAUUUUAUGGCAGGGUGUUCCUUUCUCGUCGAUGGUCAGC | |
| | ACA | |
| N20_NNAGAAA_+5_ | AAGGCUGUGCUGACCAUCGAGUUUUUGUACUCUCAAGAAAUUG | 576 |
| S_F11E12_TtoC | CAGAAGCUACAAAGAUAAGGCUUCAUGCCGAAAUCAACACCCU | |
| | GUCAUUUUAUGGCAGGGUGUUCCUUUCUCGUCGAUGGUCAGC | |
| | AC | |
| N20_NNAGAAA_+5_ | AAGGCUGUGCUGACCAUCGAGUUUUUGUACUCUCAAGAAAUUG | 577 |
| S_F10E12_TtoC | CAGAAGCUACAAAGAUAAGGCUUCAUGCCGAAAUCAACACCCU | |
| | GUCAUUUUAUGGCAGGGUGUUCCUUUCUCGUCGAUGGUCAGC | |
| | A | |
| N20_NNAGAAA_+5_ | AAGGCUGUGCUGACCAUCGAGUUUUUGUACUCUCAAGAAAUUG | 578 |
| S_F9E12_TtoC | CAGAAGCUACAAAGAUAAGGCUUCAUGCCGAAAUCAACACCCU | |
| | GUCAUUUUAUGGCAGGGUGUUCCUUUCUCGUCGAUGGUCAGC | |
| N20_NNAGAAA_+5_ | AAGGCUGUGCUGACCAUCGAGUUUUUGUACUCUCAAGAAAUUG | 579 |
| S_F8E12_TtoC | CAGAAGCUACAAAGAUAAGGCUUCAUGCCGAAAUCAACACCCU | |
| | GUCAUUUUAUGGCAGGGUGUUCCUUUCUCGUCGAUGGUCAG | |
| N20_NNAGAAA_+5_ | AAGGCUGUGCUGACCAUCGAGUUUUUGUACUCUCAAGAAAUUG | 580 |
| S_F7E12_TtoC | CAGAAGCUACAAAGAUAAGGCUUCAUGCCGAAAUCAACACCCU | |
| | GUCAUUUUAUGGCAGGGUGUUCCUUUCUCGUCGAUGGUCA | |
| N20_NNAGAAA_+5_ | AAGGCUGUGCUGACCAUCGAGUUUUUGUACUCUCAAGAAAUUG | 581 |
| S_F12E14_TtoC | CAGAAGCUACAAAGAUAAGGCUUCAUGCCGAAAUCAACACCCU | |
| | GUCAUUUUAUGGCAGGGUGUUUCCCUUUCUCGUCGAUGGUCA | |
| | GCACA | |
| N20_NNAGAAA_+5_ | AAGGCUGUGCUGACCAUCGAGUUUUUGUACUCUCAAGAAAUUG | 582 |
| S_F11E14_TtoC | CAGAAGCUACAAAGAUAAGGCUUCAUGCCGAAAUCAACACCCU | |
| | GUCAUUUUAUGGCAGGGUGUUUCCCUUUCUCGUCGAUGGUCA | |
| | GCAC | |
| N20_NNAGAAA_+5_ | AAGGCUGUGCUGACCAUCGAGUUUUUGUACUCUCAAGAAAUUG | 583 |
| S_F10E14_TtoC | CAGAAGCUACAAAGAUAAGGCUUCAUGCCGAAAUCAACACCCU | |
| | GUCAUUUUAUGGCAGGGUGUUUCCCUUUCUCGUCGAUGGUCA | |
| | GCA | |
| N20_NNAGAAA_+5_ | AAGGCUGUGCUGACCAUCGAGUUUUUGUACUCUCAAGAAAUUG | 584 |
| S_F9E14_TtoC | CAGAAGCUACAAAGAUAAGGCUUCAUGCCGAAAUCAACACCCU | |
| | GUCAUUUUAUGGCAGGGUGUUUCCCUUUCUCGUCGAUGGUCA | |
| | GC | |
| N20_NNAGAAA_+5_ | AAGGCUGUGCUGACCAUCGAGUUUUUGUACUCUCAAGAAAUUG | 585 |
| S_F8E14_TtoC | CAGAAGCUACAAAGAUAAGGCUUCAUGCCGAAAUCAACACCCU | |
| | GUCAUUUUAUGGCAGGGUGUUUCCCUUUCUCGUCGAUGGUCA | |
| | G | |
| N20_NNAGAAA_+5_ | AAGGCUGUGCUGACCAUCGAGUUUUUGUACUCUCAAGAAAUUG | 586 |
| S_F7E14_TtoC | CAGAAGCUACAAAGAUAAGGCUUCAUGCCGAAAUCAACACCCU | |
| | GUCAUUUUAUGGCAGGGUGUUUCCCUUUCUCGUCGAUGGUCA | |
| N20_NNAGAAA_+5_ | AAGGCUGUGCUGACCAUCGAGUUUUUGUACUCUCAAGAAAUUG | 587 |
| S_F12E16_TtoC | CAGAAGCUACAAAGAUAAGGCUUCAUGCCGAAAUCAACACCCU | |
| | GUCAUUUUAUGGCAGGGUGUUAGUCCCUUUCUCGUCGAUGGU | |
| | CAGCACA | |
| N20_NNAGAAA_+5_ | AAGGCUGUGCUGACCAUCGAGUUUUUGUACUCUCAAGAAAUUG | 588 |
| S_F11E16_TtoC | CAGAAGCUACAAAGAUAAGGCUUCAUGCCGAAAUCAACACCCU | |
| | GUCAUUUUAUGGCAGGGUGUUAGUCCCUUUCUCGUCGAUGGU | |
| | CAGCAC | |
| N20_NNAGAAA_+5_ | AAGGCUGUGCUGACCAUCGAGUUUUUGUACUCUCAAGAAAUUG | 589 |
| S_F10E16_TtoC | CAGAAGCUACAAAGAUAAGGCUUCAUGCCGAAAUCAACACCCU | |
| | GUCAUUUUAUGGCAGGGUGUUAGUCCCUUUCUCGUCGAUGGU | |
| | CAGCA | |
| N20_NNAGAAA_+5_ | AAGGCUGUGCUGACCAUCGAGUUUUUGUACUCUCAAGAAAUUG | 590 |
| S_F9E16_TtoC | CAGAAGCUACAAAGAUAAGGCUUCAUGCCGAAAUCAACACCCU | |
| | GUCAUUUUAUGGCAGGGUGUUAGUCCCUUUCUCGUCGAUGGU | |
| | CAGC | |
| N20_NNAGAAA_+5_ | AAGGCUGUGCUGACCAUCGAGUUUUUGUACUCUCAAGAAAUUG | 591 |
| S_F8E16_TtoC | CAGAAGCUACAAAGAUAAGGCUUCAUGCCGAAAUCAACACCCU | |
| | GUCAUUUUAUGGCAGGGUGUUAGUCCCUUUCUCGUCGAUGGU | |
| | CAG | |
| N20_NNAGAAA_+5_ | AAGGCUGUGCUGACCAUCGAGUUUUUGUACUCUCAAGAAAUUG | 592 |
| S_F7E16_TtoC | CAGAAGCUACAAAGAUAAGGCUUCAUGCCGAAAUCAACACCCU | |
| | GUCAUUUUAUGGCAGGGUGUUAGUCCCUUUCUCGUCGAUGGU | |
| | CA | |
| N20_NAA_+1_S_ | CUGUGCUGACCAUCGACAAGGUUUUAGAGCUAGAAAUAGCAAG | 593 |
| F12E4_TtoC | UUAAAAUAAGGCUAGUCCGUUAUCAACUUGAAAAAGUGGCACC | |
| | GAGUCGGUGCUCUCGUCGAUGGUCAG | |
| N20_NAA_+1_S_ | CUGUGCUGACCAUCGACAAGGUUUUAGAGCUAGAAAUAGCAAG | 594 |
| F11E4_TtoC | UUAAAAUAAGGCUAGUCCGUUAUCAACUUGAAAAAGUGGCACC | |
| | GAGUCGGUGCUCUCGUCGAUGGUCA | |
| N20_NAA_+1_S_ | CUGUGCUGACCAUCGACAAGGUUUUAGAGCUAGAAAUAGCAAG | 595 |
| F10E4_TtoC | UUAAAAUAAGGCUAGUCCGUUAUCAACUUGAAAAAGUGGCACC | |
| | GAGUCGGUGCUCUCGUCGAUGGUC | |
| N20_NAA_+1_S_ | CUGUGCUGACCAUCGACAAGGUUUUAGAGCUAGAAAUAGCAAG | 596 |
| F9E4_TtoC | UUAAAAUAAGGCUAGUCCGUUAUCAACUUGAAAAAGUGGCACC | |
| | GAGUCGGUGCUCUCGUCGAUGGU | |
| N20_NAA_+1_S_ | CUGUGCUGACCAUCGACAAGGUUUUAGAGCUAGAAAUAGCAAG | 597 |
| F8E4_TtoC | UUAAAAUAAGGCUAGUCCGUUAUCAACUUGAAAAAGUGGCACC | |
| | GAGUCGGUGCUCUCGUCGAUGG | |
| N20_NAA_+1_S_ | CUGUGCUGACCAUCGACAAGGUUUUAGAGCUAGAAAUAGCAAG | 598 |
| F7E4_TtoC | UUAAAAUAAGGCUAGUCCGUUAUCAACUUGAAAAAGUGGCACC | |
| | GAGUCGGUGCUCUCGUCGAUG | |
| N20_NAA_+1_S_ | CUGUGCUGACCAUCGACAAGGUUUUAGAGCUAGAAAUAGCAAG | 599 |
| F12E6_TtoC | UUAAAAUAAGGCUAGUCCGUUAUCAACUUGAAAAAGUGGCACC | |
| | GAGUCGGUGCUUUCUCGUCGAUGGUCAG | |
| N20_NAA_+1_S_ | CUGUGCUGACCAUCGACAAGGUUUUAGAGCUAGAAAUAGCAAG | 600 |
| F11E6_Tto | UUAAAAUAAGGCUAGUCCGUUAUCAACUUGAAAAAGUGGCACC | |
| | GAGUCGGUGCUUUCUCGUCGAUGGUCA | |
| N20_NAA_+1_S_ | CUGUGCUGACCAUCGACAAGGUUUUAGAGCUAGAAAUAGCAAG | 601 |
| F10E6_TtoC | UUAAAAUAAGGCUAGUCCGUUAUCAACUUGAAAAAGUGGCACC | |
| | GAGUCGGUGCUUUCUCGUCGAUGGUC | |
| N20_NAA_+1_S_ | CUGUGCUGACCAUCGACAAGGUUUUAGAGCUAGAAAUAGCAAG | 602 |
| F9E6_TtoC | UUAAAAUAAGGCUAGUCCGUUAUCAACUUGAAAAAGUGGCACC | |
| | GAGUCGGUGCUUUCUCGUCGAUGGU | |
| N20_NAA_+1_S_ | CUGUGCUGACCAUCGACAAGGUUUUAGAGCUAGAAAUAGCAAG | 603 |
| F8E6_TtoC | UUAAAAUAAGGCUAGUCCGUUAUCAACUUGAAAAAGUGGCACC | |
| | GAGUCGGUGCUUUCUCGUCGAUGG | |
| N20_NAA_+1_S_ | CUGUGCUGACCAUCGACAAGGUUUUAGAGCUAGAAAUAGCAAG | 604 |
| F7E6_TtoC | UUAAAAUAAGGCUAGUCCGUUAUCAACUUGAAAAAGUGGCACC | |
| | GAGUCGGUGCUUUCUCGUCGAUG | |
| N20_NAA_+1_S_ | CUGUGCUGACCAUCGACAAGGUUUUAGAGCUAGAAAUAGCAAG | 605 |
| F12E8_TtoC | UUAAAAUAAGGCUAGUCCGUUAUCAACUUGAAAAAGUGGCACC | |
| | GAGUCGGUGCCCUUUCUCGUCGAUGGUCAG | |
| N20_NAA_+1_S_ | CUGUGCUGACCAUCGACAAGGUUUUAGAGCUAGAAAUAGCAAG | 606 |
| F11E8_TtoC | UUAAAAUAAGGCUAGUCCGUUAUCAACUUGAAAAAGUGGCACC | |
| | GAGUCGGUGCCCUUUCUCGUCGAUGGUCA | |
| N20_NAA_+1_S_ | CUGUGCUGACCAUCGACAAGGUUUUAGAGCUAGAAAUAGCAAG | 607 |
| F10E8_TtoC | UUAAAAUAAGGCUAGUCCGUUAUCAACUUGAAAAAGUGGCACC | |
| | GAGUCGGUGCCCUUUCUCGUCGAUGGUC | |
| N20_NAA_+1_S_ | CUGUGCUGACCAUCGACAAGGUUUUAGAGCUAGAAAUAGCAAG | 608 |
| F9E8_TtoC | UUAAAAUAAGGCUAGUCCGUUAUCAACUUGAAAAAGUGGCACC | |
| | GAGUCGGUGCCCUUUCUCGUCGAUGGU | |
| N20_NAA_+1_S_ | CUGUGCUGACCAUCGACAAGGUUUUAGAGCUAGAAAUAGCAAG | 609 |
| F8E8_TtoC | UUAAAAUAAGGCUAGUCCGUUAUCAACUUGAAAAAGUGGCACC | |
| | GAGUCGGUGCCCUUUCUCGUCGAUGG | |
| N20_NAA_+1_S_ | CUGUGCUGACCAUCGACAAGGUUUUAGAGCUAGAAAUAGCAAG | 610 |
| F7E8_TtoC | UUAAAAUAAGGCUAGUCCGUUAUCAACUUGAAAAAGUGGCACC | |
| | GAGUCGGUGCCCUUUCUCGUCGAUG | |
| N20_NAA_+1_S_ | CUGUGCUGACCAUCGACAAGGUUUUAGAGCUAGAAAUAGCAAG | 611 |
| F12E10_TtoC | UUAAAAUAAGGCUAGUCCGUUAUCAACUUGAAAAAGUGGCACC | |
| | GAGUCGGUGCUCCCUUUCUCGUCGAUGGUCAG | |
| N20_NAA_+1_S_ | CUGUGCUGACCAUCGACAAGGUUUUAGAGCUAGAAAUAGCAAG | 612 |
| F11E10_TtoC | UUAAAAUAAGGCUAGUCCGUUAUCAACUUGAAAAAGUGGCACC | |
| | GAGUCGGUGCUCCCUUUCUCGUCGAUGGUCA | |
| N20_NAA_+1_S_ | CUGUGCUGACCAUCGACAAGGUUUUAGAGCUAGAAAUAGCAAG | 613 |
| F10E10_TtoC | UUAAAAUAAGGCUAGUCCGUUAUCAACUUGAAAAAGUGGCACC | |
| | GAGUCGGUGCUCCCUUUCUCGUCGAUGGUC | |
| N20_NAA_+1_S_ | CUGUGCUGACCAUCGACAAGGUUUUAGAGCUAGAAAUAGCAAG | 614 |
| F9E10_TtoC | UUAAAAUAAGGCUAGUCCGUUAUCAACUUGAAAAAGUGGCACC | |
| | GAGUCGGUGCUCCCUUUCUCGUCGAUGGU | |
| N20_NAA_+1_S_ | CUGUGCUGACCAUCGACAAGGUUUUAGAGCUAGAAAUAGCAAG | 615 |
| F8E10_TtoC | UUAAAAUAAGGCUAGUCCGUUAUCAACUUGAAAAAGUGGCACC | |
| | GAGUCGGUGCUCCCUUUCUCGUCGAUGG | |
| N20_NAA_+1_S_ | CUGUGCUGACCAUCGACAAGGUUUUAGAGCUAGAAAUAGCAAG | 616 |
| F7E10_TtoC | UUAAAAUAAGGCUAGUCCGUUAUCAACUUGAAAAAGUGGCACC | |
| | GAGUCGGUGCUCCCUUUCUCGUCGAUG | |
| N20_NAA_+1_S_ | CUGUGCUGACCAUCGACAAGGUUUUAGAGCUAGAAAUAGCAAG | 617 |
| F12E12_TtoC | UUAAAAUAAGGCUAGUCCGUUAUCAACUUGAAAAAGUGGCACC | |
| | GAGUCGGUGCAGUCCCUUUCUCGUCGAUGGUCAG | |
| N20_NAA_+1_S_ | CUGUGCUGACCAUCGACAAGGUUUUAGAGCUAGAAAUAGCAAG | 618 |
| F11E12_TtoC | UUAAAAUAAGGCUAGUCCGUUAUCAACUUGAAAAAGUGGCACC | |
| | GAGUCGGUGCAGUCCCUUUCUCGUCGAUGGUCA | |
| N20_NAA_+1_S_ | CUGUGCUGACCAUCGACAAGGUUUUAGAGCUAGAAAUAGCAAG | 619 |
| F10E12_TtoC | UUAAAAUAAGGCUAGUCCGUUAUCAACUUGAAAAAGUGGCACC | |
| | GAGUCGGUGCAGUCCCUUUCUCGUCGAUGGUC | |
| N20_NAA_+1_S_ | CUGUGCUGACCAUCGACAAGGUUUUAGAGCUAGAAAUAGCAAG | 620 |
| F9E12_TtoC | UUAAAAUAAGGCUAGUCCGUUAUCAACUUGAAAAAGUGGCACC | |
| | GAGUCGGUGCAGUCCCUUUCUCGUCGAUGGU | |
| N20_NAA_+1_S_ | CUGUGCUGACCAUCGACAAGGUUUUAGAGCUAGAAAUAGCAAG | 621 |
| F8E12_TtoC | UUAAAAUAAGGCUAGUCCGUUAUCAACUUGAAAAAGUGGCACC | |
| | GAGUCGGUGCAGUCCCUUUCUCGUCGAUGG | |
| N20_NAA_+1_S_ | CUGUGCUGACCAUCGACAAGGUUUUAGAGCUAGAAAUAGCAAG | 622 |
| F7E12_TtoC | UUAAAAUAAGGCUAGUCCGUUAUCAACUUGAAAAAGUGGCACC | |
| | GAGUCGGUGCAGUCCCUUUCUCGUCGAUG | |

¹For RNA, T is U; U are T in the sequence listing. For each entry, the spacer sequence is underlined and the extension arm is bold. The description indicates the length of the FBS (F) and ET (E) or homology region of the extension arm.

TABLE 13B
EXEMPLARY MODIFIED tagRNA SEQUENCES FOR EDITING SERPINA1

| NAME | SEQUENCE1,2 | SEQ ID NO: |
|---|---|---|
| N20_NNAGAAA_ | mA*mA*mG*rGrCrUrGrUrGrCrUrGrArCrCrArUrCrGrArGrUrUrUrUrUrG | 623 |
| +5_S_F12E8_TtoC | rUrArCrUrCrUrCrArArGrArArArUrUrGrCrArGrArArGrCrUrArCrArArArG | |
| | rArUrArArGrGrCrUrUrCrArUrGrCrCrGrArArArUrCrArArCrArCrCrCrUrG | |
| | rUrCrArUrUrUrUrArUrGrGrCrArGrGrGrUrGrUrUrUrCrUrCrGrUrCrGr | |
| | ArUrGrGrUrCrArGrC*mA*mC*mA | |
| N20_NNAGAAA_ | mA*mA*mG*rGrCrUrGrUrGrCrUrGrArCrCrArUrCrGrArGrUrUrUrUrUrG | 624 |
| +5_S_F11E8_TtoC | rUrArCrUrCrUrCrArArGrArArArUrUrGrCrArGrArArGrCrUrArCrArArArG | |
| | rArUrArArGrGrCrUrUrCrArUrGrCrCrGrArArArUrCrArArCrArCrCrCrUrG | |
| | rUrCrArUrUrUrUrArUrGrGrCrArGrGrGrUrGrUrUrUrCrUrCrGrUrCrGr | |
| | ArUrGrGrUrCrArG*mC*mA*mC | |
| N20_NNAGAAA_ | mA*mA*mG*rGrCrUrGrUrGrCrUrGrArCrCrArUrCrGrArGrUrUrUrUrUrG | 625 |
| +5_S_F10E8_TtoC | rUrArCrUrCrUrCrArArGrArArArUrUrGrCrArGrArArGrCrUrArCrArArArG | |
| | rArUrArArGrGrCrUrUrCrArUrGrCrCrGrArArArUrCrArArCrArCrCrCrUrG | |
| | rUrCrArUrUrUrUrArUrGrGrCrArGrGrGrUrGrUrUrUrCrUrCrGrUrCrGr | |
| | ArUrGrGrUrCrA*mG*mC*mA | |
| N20_NNAGAAA_ | mA*mA*mG*rGrCrUrGrUrGrCrUrGrArCrCrArUrCrGrArGrUrUrUrUrUrG | 626 |
| +5_S_F9E8_TtoC | rUrArCrUrCrUrCrArArGrArArArUrUrGrCrArGrArArGrCrUrArCrArArArG | |
| | rArUrArArGrGrCrUrUrCrArUrGrCrCrGrArArArUrCrArArCrArCrCrCrUrG | |
| | rUrCrArUrUrUrUrArUrGrGrCrArGrGrGrUrGrUrUrUrCrUrCrGrUrCrGr | |
| | ArUrGrGrUrC*mA*mG*mC | |
| N20_NNAGAAA_ | mA*mA*mG*rGrCrUrGrUrGrCrUrGrArCrCrArUrCrGrArGrUrUrUrUrUrG | 627 |
| +5_S_F8E8_TtoC | rUrArCrUrCrUrCrArArGrArArArUrUrGrCrArGrArArGrCrUrArCrArArArG | |
| | rArUrArArGrGrCrUrUrCrArUrGrCrCrGrArArArUrCrArArCrArCrCrCrUrG | |
| | rUrCrArUrUrUrUrArUrGrGrCrArGrGrGrUrGrUrUrUrCrUrCrGrUrCrGr | |
| | ArUrGrGrU*mC*mA*mG | |
| N20_NNAGAAA_ | mA*mA*mG*rGrCrUrGrUrGrCrUrGrArCrCrArUrCrGrArGrUrUrUrUrUrG | 628 |
| +5_S_F7E8_TtoC | rUrArCrUrCrUrCrArArGrArArArUrUrGrCrArGrArArGrCrUrArCrArArArG | |
| | rArUrArArGrGrCrUrUrCrArUrGrCrCrGrArArArUrCrArArCrArCrCrCrUrG | |
| | rUrCrArUrUrUrUrArUrGrGrCrArGrGrGrUrGrUrUrUrCrUrCrGrUrCrGr | |
| | ArUrGrG*mU*mC*mA | |
| N20_NNAGAAA_ | mA*mA*mG*rGrCrUrGrUrGrCrUrGrArCrCrArUrCrGrArGrUrUrUrUrUrG | 629 |
| +5_S_F12E10_TtoC | rUrArCrUrCrUrCrArArGrArArArUrUrGrCrArGrArArGrCrUrArCrArArArG | |
| | rArUrArArGrGrCrUrUrCrArUrGrCrCrGrArArArUrCrArArCrArCrCrCrUrG | |
| | rUrCrArUrUrUrUrArUrGrGrCrArGrGrGrUrGrUrUrUrUrUrCrUrCrGrUr | |
| | CrGrArUrGrGrUrCrArGrC*mA*mC*mA | |
| N20_NNAGAAA_ | mA*mA*mG*rGrCrUrGrUrGrCrUrGrArCrCrArUrCrGrArGrUrUrUrUrUrG | 630 |
| +5_S_F11E10_TtoC | rUrArCrUrCrUrCrArArGrArArArUrUrGrCrArGrArArGrCrUrArCrArArArG | |
| | rArUrArArGrGrCrUrUrCrArUrGrCrCrGrArArArUrCrArArCrArCrCrCrUrG | |
| | rUrCrArUrUrUrUrArUrGrGrCrArGrGrGrUrGrUrUrUrUrUrCrUrCrGrUr | |
| | CrGrArUrGrGrUrCrArG*mC*mA*mC | |
| N20_NNAGAAA_ | mA*mA*mG*rGrCrUrGrUrGrCrUrGrArCrCrArUrCrGrArGrUrUrUrUrUrG | 631 |
| +5_S_F10E10_TtoC | rUrArCrUrCrUrCrArArGrArArArUrUrGrCrArGrArArGrCrUrArCrArArArG | |
| | rArUrArArGrGrCrUrUrCrArUrGrCrCrGrArArArUrCrArArCrArCrCrCrUrG | |
| | rUrCrArUrUrUrUrArUrGrGrCrArGrGrGrUrGrUrUrUrUrUrCrUrCrGrUr | |
| | CrGrArUrGrGrUrCrA*mG*mC*mA | |
| N20_NNAGAAA_ | mA*mA*mG*rGrCrUrGrUrGrCrUrGrArCrCrArUrCrGrArGrUrUrUrUrUrG | 632 |
| +5_S_F9E10_TtoC | rUrArCrUrCrUrCrArArGrArArArUrUrGrCrArGrArArGrCrUrArCrArArArG | |
| | rArUrArArGrGrCrUrUrCrArUrGrCrCrGrArArArUrCrArArCrArCrCrCrUrG | |
| | rUrCrArUrUrUrUrArUrGrGrCrArGrGrGrUrGrUrUrUrUrUrCrUrCrGrUr | |
| | CrGrArUrGrGrUrC*mA*mG*mC | |
| N20_NNAGAAA_ | mA*mA*mG*rGrCrUrGrUrGrCrUrGrArCrCrArUrCrGrArGrUrUrUrUrUrG | 633 |
| +5_S_F8E10_TtoC | rUrArCrUrCrUrCrArArGrArArArUrUrGrCrArGrArArGrCrUrArCrArArArG | |
| | rArUrArArGrGrCrUrUrCrArUrGrCrCrGrArArArUrCrArArCrArCrCrCrUrG | |
| | rUrCrArUrUrUrUrArUrGrGrCrArGrGrGrUrGrUrUrUrUrUrCrUrCrGrUr | |
| | CrGrArUrGrGrU*mC*mA*mG | |
| N20_NNAGAAA_ | mA*mA*mG*rGrCrUrGrUrGrCrUrGrArCrCrArUrCrGrArGrUrUrUrUrUrG | 634 |
| +5_S_F7E10_TtoC | rUrArCrUrCrUrCrArArGrArArArUrUrGrCrArGrArArGrCrUrArCrArArArG | |
| | rArUrArArGrGrCrUrUrCrArUrGrCrCrGrArArArUrCrArArCrArCrCrCrUrG | |
| | rUrCrArUrUrUrUrArUrGrGrCrArGrGrGrUrGrUrUrUrUrUrCrUrCrGrUr | |
| | CrGrArUrGrG*mU*mC*mA | |
| N20_NNAGAAA_ | mA*mA*mG*rGrCrUrGrUrGrCrUrGrArCrCrArUrCrGrArGrUrUrUrUrUrG | 635 |
| +5_S_F12E12_TtoC | rUrArCrUrCrUrCrArArGrArArArUrUrGrCrArGrArArGrCrUrArCrArArArG | |
| | rArUrArArGrGrCrUrUrCrArUrGrCrCrGrArArArUrCrArArCrArCrCrCrUrG | |
| | rUrCrArUrUrUrUrArUrGrGrCrArGrGrGrUrGrUrUrCrCrUrUrUrCrUrCr | |
| | GrUrCrGrArUrGrGrUrCrArGrC*mA*mC*mA | |
| N20_NNAGAAA_ | mA*mA*mG*rGrCrUrGrUrGrCrUrGrArCrCrArUrCrGrArGrUrUrUrUrUrG | 636 |
| +5_S_F11R12_TtoC | rUrArCrUrCrUrCrArArGrArArArUrUrGrCrArGrArArGrCrUrArCrArArArG | |
| | rArUrArArGrGrCrUrUrCrArUrGrCrCrGrArArArUrCrArArCrArCrCrCrUrG | |
| | rUrCrArUrUrUrUrArUrGrGrCrArGrGrGrUrGrUrUrCrCrUrUrUrCrUrCr | |
| | GrUrCrGrArUrGrGrUrCrArG*mC*mA*mC | |
| N20_NNAGAAA_ | mA*mA*mG*rGrCrUrGrUrGrCrUrGrArCrCrArUrCrGrArGrUrUrUrUrUrG | 637 |
| +5_S_F10E12_TtoC | rUrArCrUrCrUrCrArArGrArArArUrUrGrCrArGrArArGrCrUrArCrArArArG | |
| | rArUrArArGrGrCrUrUrCrArUrGrCrCrGrArArArUrCrArArCrArCrCrCrUrG | |
| | rUrCrArUrUrUrUrArUrGrGrCrArGrGrGrUrGrUrUrCrCrUrUrUrCrUrCr | |
| | GrUrCrGrArUrGrGrUrCrA*mG*mC*mA | |
| N20_NNAGAAA_ | mA*mA*mG*rGrCrUrGrUrGrCrUrGrArCrCrArUrCrGrArGrUrUrUrUrUrG | 638 |
| +5_S_F9E12_TtoC | rUrArCrUrCrUrCrArArGrArArArUrUrGrCrArGrArArGrCrUrArCrArArArG | |
| | rArUrArArGrGrCrUrUrCrArUrGrCrCrGrArArArUrCrArArCrArCrCrCrUrG | |
| | rUrCrArUrUrUrUrArUrGrGrCrArGrGrGrUrGrUrUrCrCrUrUrUrCrUrCr | |
| | GrUrCrGrArUrGrGrUrC*mA*mG*mC | |
| N20_NNAGAAA_ | mA*mA*mG*rGrCrUrGrUrGrCrUrGrArCrCrArUrCrGrArGrUrUrUrUrUrG | 639 |
| +5_S_F8E12_TtoC | rUrArCrUrCrUrCrArArGrArArArUrUrGrCrArGrArArGrCrUrArCrArArArG | |
| | rArUrArArGrGrCrUrUrCrArUrGrCrCrGrArArArUrCrArArCrArCrCrCrUrG | |
| | rUrCrArUrUrUrUrArUrGrGrCrArGrGrGrUrGrUrUrCrCrUrUrUrCrUrCr | |
| | GrUrCrGrArUrGrGrU*mC*mA*mG | |
| N20_NNAGAAA_ | mA*mA*mG*rGrCrUrGrUrGrCrUrGrArCrCrArUrCrGrArGrUrUrUrUrUrG | 640 |
| +5_S_F7E12_TtoC | rUrArCrUrCrUrCrArArGrArArArUrUrGrCrArGrArArGrCrUrArCrArArArG | |
| | rArUrArArGrGrCrUrUrCrArUrGrCrCrGrArArArUrCrArArCrArCrCrCrUrG | |
| | rUrCrArUrUrUrUrArUrGrGrCrArGrGrGrUrGrUrUrCrCrUrUrUrCrUrCr | |
| | GrUrCrGrArUrGrG*mU*mC*mA | |
| N20_NNAGAAA_ | mA*mA*mG*rGrCrUrGrUrGrCrUrGrArCrCrArUrCrGrArGrUrUrUrUrUrG | 641 |
| +5_S_F12E14_TtoC | rUrArCrUrCrUrCrArArGrArArArUrUrGrCrArGrArArGrCrUrArCrArArArG | |
| | rArUrArArGrGrCrUrUrCrArUrGrCrCrGrArArArUrCrArArCrArCrCrCrUrG | |
| | rUrCrArUrUrUrUrArUrGrGrCrArGrGrGrUrGrUrUrUrCrCrCrUrUrUrCr | |
| | UrCrGrUrCrGrArUrGrGrUrCrArGrC*mA*mC*mA | |
| N20_NNAGAAA_ | mA*mA*mG*rGrCrUrGrUrGrCrUrGrArCrCrArUrCrGrArGrUrUrUrUrUrG | 642 |
| +5_S_F11R14_TtoC | rUrArCrUrCrUrCrArArGrArArArUrUrGrCrArGrArArGrCrUrArCrArArArG | |
| | rArUrArArGrGrCrUrUrCrArUrGrCrCrGrArArArUrCrArArCrArCrCrCrUrG | |
| | rUrCrArUrUrUrUrArUrGrGrCrArGrGrGrUrGrUrUrUrCrCrCrUrUrUrCr | |
| | UrCrGrUrCrGrArUrGrGrUrCrArG*mC*mA*mC | |
| N20_NNAGAAA_ | mA*mA*mG*rGrCrUrGrUrGrCrUrGrArCrCrArUrCrGrArGrUrUrUrUrUrG | 643 |
| +5_S_F10E14_TtoC | rUrArCrUrCrUrCrArArGrArArArUrUrGrCrArGrArArGrCrUrArCrArArArG | |
| | rArUrArArGrGrCrUrUrCrArUrGrCrCrGrArArArUrCrArArCrArCrCrCrUrG | |
| | rUrCrArUrUrUrUrArUrGrGrCrArGrGrGrUrGrUrUrUrCrCrCrUrUrUrCr | |
| | UrCrGrUrCrGrArUrGrGrUrCrA*mG*mC*mA | |
| N20_NNAGAAA_ | mA*mA*mG*rGrCrUrGrUrGrCrUrGrArCrCrArUrCrGrArGrUrUrUrUrUrG | 644 |
| +5_S_F9E14_TtoC | rUrArCrUrCrUrCrArArGrArArArUrUrGrCrArGrArArGrCrUrArCrArArArG | |
| | rArUrArArGrGrCrUrUrCrArUrGrCrCrGrArArArUrCrArArCrArCrCrCrUrG | |
| | rUrCrArUrUrUrUrArUrGrGrCrArGrGrGrUrGrUrUrUrCrCrCrUrUrUrCr | |
| | UrCrGrUrCrGrArUrGrGrUrC*mA*mG*mC | |
| N20_NNAGAAA_ | mA*mA*mG*rGrCrUrGrUrGrCrUrGrArCrCrArUrCrGrArGrUrUrUrUrUrG | 645 |
| +5_S_F8E14_TtoC | rUrArCrUrCrUrCrArArGrArArArUrUrGrCrArGrArArGrCrUrArCrArArArG | |
| | rArUrArArGrGrCrUrUrCrArUrGrCrCrGrArArArUrCrArArCrArCrCrCrUrG | |
| | rUrCrArUrUrUrUrArUrGrGrCrArGrGrGrUrGrUrUrUrCrCrCrUrUrUrCr | |
| | UrCrGrUrCrGrArUrGrGrU*mC*mA*mG | |
| N20_NNAGAAA_ | mA*mA*mG*rGrCrUrGrUrGrCrUrGrArCrCrArUrCrGrArGrUrUrUrUrUrG | 646 |
| +5_S_F7E14_TtoC | rUrArCrUrCrUrCrArArGrArArArUrUrGrCrArGrArArGrCrUrArCrArArArG | |
| | rArUrArArGrGrCrUrUrCrArUrGrCrCrGrArArArUrCrArArCrArCrCrCrUrG | |
| | rUrCrArUrUrUrUrArUrGrGrCrArGrGrGrUrGrUrUrUrCrCrCrUrUrUrCr | |
| | UrCrGrUrCrGrArUrGrG*mU*mC*mA | |
| N20_NNAGAAA_ | mA*mA*mG*rGrCrUrGrUrGrCrUrGrArCrCrArUrCrGrArGrUrUrUrUrUrG | 647 |
| +5_S_F12E16_TtoC | rUrArCrUrCrUrCrArArGrArArArUrUrGrCrArGrArArGrCrUrArCrArArArG | |
| | rArUrArArGrGrCrUrUrCrArUrGrCrCrGrArArArUrCrArArCrArCrCrCrUrG | |
| | rUrCrArUrUrUrUrArUrGrGrCrArGrGrGrUrGrUrUrArGrUrCrCrCrUrUr | |
| | UrCrUrCrGrUrCrGrArUrGrGrUrCrArGrC*mA*mC*mA | |
| N20_NNAGAAA_ | mA*mA*mG*rGrCrUrGrUrGrCrUrGrArCrCrArUrCrGrArGrUrUrUrUrUrG | 648 |
| +5_S_F11E16_TtoC | rUrArCrUrCrUrCrArArGrArArArUrUrGrCrArGrArArGrCrUrArCrArArArG | |
| | rArUrArArGrGrCrUrUrCrArUrGrCrCrGrArArArUrCrArArCrArCrCrCrUrG | |
| | rUrCrArUrUrUrUrArUrGrGrCrArGrGrGrUrGrUrUrArGrUrCrCrCrUrUr | |
| | UrCrUrCrGrUrCrGrArUrGrGrUrCrArG*mC*mA*mC | |
| N20_NNAGAAA_ | mA*mA*mG*rGrCrUrGrUrGrCrUrGrArCrCrArUrCrGrArGrUrUrUrUrUrG | 649 |
| +5_S_F10E16_TtoC | rUrArCrUrCrUrCrArArGrArArArUrUrGrCrArGrArArGrCrUrArCrArArArG | |
| | rArUrArArGrGrCrUrUrCrArUrGrCrCrGrArArArUrCrArArCrArCrCrCrUrG | |
| | rUrCrArUrUrUrUrArUrGrGrCrArGrGrGrUrGrUrUrArGrUrCrCrCrUrUr | |
| | UrCrUrCrGrUrCrGrArUrGrGrUrCrA*mG*mC*mA | |
| N20_NNAGAAA_ | mA*mA*mG*rGrCrUrGrUrGrCrUrGrArCrCrArUrCrGrArGrUrUrUrUrUrG | 650 |
| +5_S_F9E16_TtoC | rUrArCrUrCrUrCrArArGrArArArUrUrGrCrArGrArArGrCrUrArCrArArArG | |
| | rArUrArArGrGrCrUrUrCrArUrGrCrCrGrArArArUrCrArArCrArCrCrCrUrG | |
| | rUrCrArUrUrUrUrArUrGrGrCrArGrGrGrUrGrUrUrArGrUrCrCrCrUrUr | |
| | UrCrUrCrGrUrCrGrArUrGrGrUrC*mA*mG*mC | |
| N20_NNAGAAA_ | mA*mA*mG*rGrCrUrGrUrGrCrUrGrArCrCrArUrCrGrArGrUrUrUrUrUrG | 651 |
| +5_S_F8R16_TtoC | rUrArCrUrCrUrCrArArGrArArArUrUrGrCrArGrArArGrCrUrArCrArArArG | |
| | rArUrArArGrGrCrUrUrCrArUrGrCrCrGrArArArUrCrArArCrArCrCrCrUrG | |
| | rUrCrArUrUrUrUrArUrGrGrCrArGrGrGrUrGrUrUrArGrUrCrCrCrUrUr | |
| | UrCrUrCrGrUrCrGrArUrGrGrU*mC*mA*mG | |
| N20_NNAGAAA_ | mA*mA*mG*rGrCrUrGrUrGrCrUrGrArCrCrArUrCrGrArGrUrUrUrUrUrG | 652 |
| +5_S_F7E16_TtoC | rUrArCrUrCrUrCrArArGrArArArUrUrGrCrArGrArArGrCrUrArCrArArArG | |
| | rArUrArArGrGrCrUrUrCrArUrGrCrCrGrArArArUrCrArArCrArCrCrCrUrG | |
| | rUrCrArUrUrUrUrArUrGrGrCrArGrGrGrUrGrUrUrArGrUrCrCrCrUrUr | |
| | UrCrUrCrGrUrCrGrArUrGrG*mU*mC*mA | |
| N20_NAA_+1_S_ | mC*mU*mG*rUrGrCrUrGrArCrCrArUrCrGrArCrArArGrGrUrUrUrUrArGr | 653 |
| F12E4_TtoC | ArGrCrUrArGrArArArUrArGrCrArArGrUrUrArArArArUrArArGrGrCrUrA | |
| | rGrUrCrCrGrUrUrArUrCrArArCrUrUrGrArArArArArGrUrGrGrCrArCrCrG | |
| | rArGrUrCrGrGrUrGrCrUrCrUrCrGrUrCrGrArUrGrGrU*mC*mA*mG | |
| N20_NAA_+1_S_ | mC*mU*mG*rUrGrCrUrGrArCrCrArUrCrGrArCrArArGrGrUrUrUrUrArGr | 654 |
| F11E4_TtoC | ArGrCrUrArGrArArArUrArGrCrArArGrUrUrArArArArUrArArGrGrCrUrA | |
| | rGrUrCrCrGrUrUrArUrCrArArCrUrUrGrArArArArArGrUrGrGrCrArCrCrG | |
| | rArGrUrCrGrGrUrGrCrUrCrUrCrGrUrCrGrArUrGrG*mU*mC*mA | |
| N20_NAA_+1_S_ | mC*mU*mG*rUrGrCrUrGrArCrCrArUrCrGrArCrArArGrGrUrUrUrUrArGr | 655 |
| F10E4_TtoC | ArGrCrUrArGrArArArUrArGrCrArArGrUrUrArArArArUrArArGrGrCrUrA | |
| | rGrUrCrCrGrUrUrArUrCrArArCrUrUrGrArArArArArGrUrGrGrCrArCrCrG | |
| | rArGrUrCrGrGrUrGrCrUrCrUrCrGrUrCrGrArUrG*mG*mU*mC | |
| N20_NAA_+1_S_ | mC*mU*mG*rUrGrCrUrGrArCrCrArUrCrGrArCrArArGrGrUrUrUrUrArGr | 656 |
| F9E4_TtoC | ArGrCrUrArGrArArArUrArGrCrArArGrUrUrArArArArUrArArGrGrCrUrA | |
| | rGrUrCrCrGrUrUrArUrCrArArCrUrUrGrArArArArArGrUrGrGrCrArCrCrG | |
| | rArGrUrCrGrGrUrGrCrUrCrUrCrGrUrCrGrArU*mG*mG*mU | |
| N20_NAA_+1_S_ | mC*mU*mG*rUrGrCrUrGrArCrCrArUrCrGrArCrArArGrGrUrUrUrUrArGr | 657 |
| F8E4_TtoC | ArGrCrUrArGrArArArUrArGrCrArArGrUrUrArArArArUrArArGrGrCrUrA | |
| | rGrUrCrCrGrUrUrArUrCrArArCrUrUrGrArArArArArGrUrGrGrCrArCrCrG | |
| | rArGrUrCrGrGrUrGrCrUrCrUrCrGrUrCrGrA*mU*mG*mG | |
| N20_NAA_+1_S_ | mC*mU*mG*rUrGrCrUrGrArCrCrArUrCrGrArCrArArGrGrUrUrUrUrArGr | 658 |
| F7E4_TtoC | ArGrCrUrArGrArArArUrArGrCrArArGrUrUrArArArArUrArArGrGrCrUrA | |
| | rGrUrCrCrGrUrUrArUrCrArArCrUrUrGrArArArArArGrUrGrGrCrArCrCrG | |
| | rArGrUrCrGrGrUrGrCrUrCrUrCrGrUrCrG*mA*mU*mG | |
| N20_NAA_+1_S_ | mC*mU*mG*rUrGrCrUrGrArCrCrArUrCrGrArCrArArGrGrUrUrUrUrArGr | 659 |
| F12E6_TtoC | ArGrCrUrArGrArArArUrArGrCrArArGrUrUrArArArArUrArArGrGrCrUrA | |
| | rGrUrCrCrGrUrUrArUrCrArArCrUrUrGrArArArArArGrUrGrGrCrArCrCrG | |
| | rArGrUrCrGrGrUrGrCrUrUrUrCrUrCrGrUrCrGrArUrGrGrU*mC*mA | |
| | *mG | |
| N20_NAA_+1_S_ | mC*mU*mG*rUrGrCrUrGrArCrCrArUrCrGrArCrArArGrGrUrUrUrUrArGr | 660 |
| F11E6_TtoC | ArGrCrUrArGrArArArUrArGrCrArArGrUrUrArArArArUrArArGrGrCrUrA | |
| | rGrUrCrCrGrUrUrArUrCrArArCrUrUrGrArArArArArGrUrGrGrCrArCrCrG | |
| | rArGrUrCrGrGrUrGrCrUrUrUrCrUrCrGrUrCrGrArUrGrG*mU*mC* | |
| | mA | |
| N20_NAA_+1_S_ | mC*mU*mG*rUrGrCrUrGrArCrCrArUrCrGrArCrArArGrGrUrUrUrUrArGr | 661 |
| F10E6_TtoC | ArGrCrUrArGrArArArUrArGrCrArArGrUrUrArArArArUrArArGrGrCrUrA | |
| | rGrUrCrCrGrUrUrArUrCrArArCrUrUrGrArArArArArGrUrGrGrCrArCrCrG | |
| | rArGrUrCrGrGrUrGrCrUrUrUrCrUrCrGrUrCrGrArUrG*mG*mU*mC | |
| N20_NAA_+1_S_ | mC*mU*mG*rUrGrCrUrGrArCrCrArUrCrGrArCrArArGrGrUrUrUrUrArGr | 662 |
| F9E6_TtoC | ArGrCrUrArGrArArArUrArGrCrArArGrUrUrArArArArUrArArGrGrCrUrA | |
| | rGrUrCrCrGrUrUrArUrCrArArCrUrUrGrArArArArArGrUrGrGrCrArCrCrG | |
| | rArGrUrCrGrGrUrGrCrUrUrUrCrUrCrGrUrCrGrArU*mG*mG*mU | |
| N20_NAA_+1_S_ | mC*mU*mG*rUrGrCrUrGrArCrCrArUrCrGrArCrArArGrGrUrUrUrUrArGr | 663 |
| F8E6_TtoC | ArGrCrUrArGrArArArUrArGrCrArArGrUrUrArArArArUrArArGrGrCrUrA | |
| | rGrUrCrCrGrUrUrArUrCrArArCrUrUrGrArArArArArGrUrGrGrCrArCrCrG | |
| | rArGrUrCrGrGrUrGrCrUrUrUrCrUrCrGrUrCrGrA*mU*mG*mG | |
| N20_NAA_+1_S_ | mC*mU*mG*rUrGrCrUrGrArCrCrArUrCrGrArCrArArGrGrUrUrUrUrArGr | 664 |
| F7E6_TtoC | ArGrCrUrArGrArArArUrArGrCrArArGrUrUrArArArArUrArArGrGrCrUrA | |
| | rGrUrCrCrGrUrUrArUrCrArArCrUrUrGrArArArArArGrUrGrGrCrArCrCrG | |
| | rArGrUrCrGrGrUrGrCrUrUrUrCrUrCrGrUrCrG*mA*mU*mG | |
| N20_NAA_+1_S_ | mC*mU*mG*rUrGrCrUrGrArCrCrArUrCrGrArCrArArGrGrUrUrUrUrArGr | 665 |
| F12E8_TtoC | ArGrCrUrArGrArArArUrArGrCrArArGrUrUrArArArArUrArArGrGrCrUrA | |
| | rGrUrCrCrGrUrUrArUrCrArArCrUrUrGrArArArArArGrUrGrGrCrArCrCrG | |
| | rArGrUrCrGrGrUrGrCrCrCrUrUrUrCrUrCrGrUrCrGrArUrGrGrU*m | |
| | C*mA*mG | |
| N20_NAA_+1_S_ | mC*mU*mG*rUrGrCrUrGrArCrCrArUrCrGrArCrArArGrGrUrUrUrUrArGr | 666 |
| F11R8_TtoC | ArGrCrUrArGrArArArUrArGrCrArArGrUrUrArArArArUrArArGrGrCrUrA | |
| | rGrUrCrCrGrUrUrArUrCrArArCrUrUrGrArArArArArGrUrGrGrCrArCrCrG | |
| | rArGrUrCrGrGrUrGrCrCrCrUrUrUrCrUrCrGrUrCrGrArUrGrG*mU* | |
| | mC*mA | |
| N20_NAA_+1_S_ | mC*mU*mG*rUrGrCrUrGrArCrCrArUrCrGrArCrArArGrGrUrUrUrUrArGr | 667 |
| F10E8_TtoC | ArGrCrUrArGrArArArUrArGrCrArArGrUrUrArArArArUrArArGrGrCrUrA | |
| | rGrUrCrCrGrUrUrArUrCrArArCrUrUrGrArArArArArGrUrGrGrCrArCrCrG | |
| | rArGrUrCrGrGrUrGrCrCrCrUrUrUrCrUrCrGrUrCrGrArUrG*mG*mU | |
| | *mC | |
| N20_NAA_+1_S_ | mC*mU*mG*rUrGrCrUrGrArCrCrArUrCrGrArCrArArGrGrUrUrUrUrArGr | 668 |
| F9E8_TtoC | ArGrCrUrArGrArArArUrArGrCrArArGrUrUrArArArArUrArArGrGrCrUrA | |
| | rGrUrCrCrGrUrUrArUrCrArArCrUrUrGrArArArArArGrUrGrGrCrArCrCrG | |
| | rArGrUrCrGrGrUrGrCrCrCrUrUrUrCrUrCrGrUrCrGrArU*mG*mG* | |
| | mU | |
| N20_NAA_+1_S_ | mC*mU*mG*rUrGrCrUrGrArCrCrArUrCrGrArCrArArGrGrUrUrUrUrArGr | 669 |
| F8E8_TtoC | ArGrCrUrArGrArArArUrArGrCrArArGrUrUrArArArArUrArArGrGrCrUrA | |
| | rGrUrCrCrGrUrUrArUrCrArArCrUrUrGrArArArArArGrUrGrGrCrArCrCrG | |
| | rArGrUrCrGrGrUrGrCrCrCrUrUrUrCrUrCrGrUrCrGrA*mU*mG*mG | |
| N20_NAA_+1_S_ | mC*mU*mG*rUrGrCrUrGrArCrCrArUrCrGrArCrArArGrGrUrUrUrUrArGr | 670 |
| F7E8_TtoC | ArGrCrUrArGrArArArUrArGrCrArArGrUrUrArArArArUrArArGrGrCrUrA | |
| | rGrUrCrCrGrUrUrArUrCrArArCrUrUrGrArArArArArGrUrGrGrCrArCrCrG | |
| | rArGrUrCrGrGrUrGrCrCrCrUrUrUrCrUrCrGrUrCrG*mA*mU*mG | |
| N20_NAA_+1_S_ | mC*mU*mG*rUrGrCrUrGrArCrCrArUrCrGrArCrArArGrGrUrUrUrUrArGr | 671 |
| F12E10_TtoC | ArGrCrUrArGrArArArUrArGrCrArArGrUrUrArArArArUrArArGrGrCrUrA | |
| | rGrUrCrCrGrUrUrArUrCrArArCrUrUrGrArArArArArGrUrGrGrCrArCrCrG | |
| | rArGrUrCrGrGrUrGrCrUrCrCrCrUrUrUrCrUrCrGrUrCrGrArUrGrGr | |
| | U*mC*mA*mG | |
| N20_NAA_+1_S_ | mC*mU*mG*rUrGrCrUrGrArCrCrArUrCrGrArCrArArGrGrUrUrUrUrArGr | 672 |
| F11E10_TtoC | ArGrCrUrArGrArArArUrArGrCrArArGrUrUrArArArArUrArArGrGrCrUrA | |
| | rGrUrCrCrGrUrUrArUrCrArArCrUrUrGrArArArArArGrUrGrGrCrArCrCrG | |
| | rArGrUrCrGrGrUrGrCrUrCrCrCrUrUrUrCrUrCrGrUrCrGrArUrGrG* | |
| | mU*mC*mA | |
| N20_NAA_+1_S_ | mC*mU*mG*rUrGrCrUrGrArCrCrArUrCrGrArCrArArGrGrUrUrUrUrArGr | 673 |
| F10E10_TtoC | ArGrCrUrArGrArArArUrArGrCrArArGrUrUrArArArArUrArArGrGrCrUrA | |
| | rGrUrCrCrGrUrUrArUrCrArArCrUrUrGrArArArArArGrUrGrGrCrArCrCrG | |
| | rArGrUrCrGrGrUrGrCrUrCrCrCrUrUrUrCrUrCrGrUrCrGrArUrG*m | |
| | G*mU*mC | |
| N20_NAA_+1_S_ | mC*mU*mG*rUrGrCrUrGrArCrCrArUrCrGrArCrArArGrGrUrUrUrUrArGr | 674 |
| F9E10_TtoC | ArGrCrUrArGrArArArUrArGrCrArArGrUrUrArArArArUrArArGrGrCrUrA | |
| | rGrUrCrCrGrUrUrArUrCrArArCrUrUrGrArArArArArGrUrGrGrCrArCrCrG | |
| | rArGrUrCrGrGrUrGrCrUrCrCrCrUrUrUrCrUrCrGrUrCrGrArU*mG* | |
| | mG*mU | |
| N20_NAA_+1_S_ | mC*mU*mG*rUrGrCrUrGrArCrCrArUrCrGrArCrArArGrGrUrUrUrUrArGr | 675 |
| F8E10_TtoC | ArGrCrUrArGrArArArUrArGrCrArArGrUrUrArArArArUrArArGrGrCrUrA | |
| | rGrUrCrCrGrUrUrArUrCrArArCrUrUrGrArArArArArGrUrGrGrCrArCrCrG | |
| | rArGrUrCrGrGrUrGrCrUrCrCrCrUrUrUrCrUrCrGrUrCrGrA*mU*mG | |
| | *mG | |
| N20_NAA_+1_S_ | mC*mU*mG*rUrGrCrUrGrArCrCrArUrCrGrArCrArArGrGrUrUrUrUrArGr | 676 |
| F7E10_TtoC | ArGrCrUrArGrArArArUrArGrCrArArGrUrUrArArArArUrArArGrGrCrUrA | |
| | rGrUrCrCrGrUrUrArUrCrArArCrUrUrGrArArArArArGrUrGrGrCrArCrCrG | |
| | rArGrUrCrGrGrUrGrCrUrCrCrCrUrUrUrCrUrCrGrUrCrG*mA*mU*m | |
| | G | |
| N20_NAA_+1_S_ | mC*mU*mG*rUrGrCrUrGrArCrCrArUrCrGrArCrArArGrGrUrUrUrUrArGr | 677 |
| F12E12_TtoC | ArGrCrUrArGrArArArUrArGrCrArArGrUrUrArArArArUrArArGrGrCrUrA | |
| | rGrUrCrCrGrUrUrArUrCrArArCrUrUrGrArArArArArGrUrGrGrCrArCrCrG | |
| | rArGrUrCrGrGrUrGrCrArGrUrCrCrCrUrUrUrCrUrCrGrUrCrGrArUr | |
| | GrGrU*mC*mA*mG | |
| N20_NAA_+1_S_ | mC*mU*mG*rUrGrCrUrGrArCrCrArUrCrGrArCrArArGrGrUrUrUrUrArGr | 678 |
| F11E12_TtoC | ArGrCrUrArGrArArArUrArGrCrArArGrUrUrArArArArUrArArGrGrCrUrA | |
| | rGrUrCrCrGrUrUrArUrCrArArCrUrUrGrArArArArArGrUrGrGrCrArCrCrG | |
| | rArGrUrCrGrGrUrGrCrArGrUrCrCrCrUrUrUrCrUrCrGrUrCrGrArUr | |
| | GrG*mU*mC*mA | |
| N20_NAA_+1_S_ | mC*mU*mG*rUrGrCrUrGrArCrCrArUrCrGrArCrArArGrGrUrUrUrUrArGr | 679 |
| F10R12_TtoC | ArGrCrUrArGrArArArUrArGrCrArArGrUrUrArArArArUrArArGrGrCrUrA | |
| | rGrUrCrCrGrUrUrArUrCrArArCrUrUrGrArArArArArGrUrGrGrCrArCrCrG | |
| | rArGrUrCrGrGrUrGrCrArGrUrCrCrCrUrUrUrCrUrCrGrUrCrGrArUr | |
| | G*mG*mU*mC | |
| N20_NAA_+1_S_ | mC*mU*mG*rUrGrCrUrGrArCrCrArUrCrGrArCrArArGrGrUrUrUrUrArGr | 680 |
| F9E12_TtoC | ArGrCrUrArGrArArArUrArGrCrArArGrUrUrArArArArUrArArGrGrCrUrA | |
| | rGrUrCrCrGrUrUrArUrCrArArCrUrUrGrArArArArArGrUrGrGrCrArCrCrG | |
| | rArGrUrCrGrGrUrGrCrArGrUrCrCrCrUrUrUrCrUrCrGrUrCrGrArU* | |
| | mG*mG*mU | |
| N20_NAA_+1_S_ | mC*mU*mG*rUrGrCrUrGrArCrCrArUrCrGrArCrArArGrGrUrUrUrUrArGr | 681 |
| F8E12_TtoC | ArGrCrUrArGrArArArUrArGrCrArArGrUrUrArArArArUrArArGrGrCrUrA | |
| | rGrUrCrCrGrUrUrArUrCrArArCrUrUrGrArArArArArGrUrGrGrCrArCrCrG | |
| | rArGrUrCrGrGrUrGrCrArGrUrCrCrCrUrUrUrCrUrCrGrUrCrGrA*m | |
| | U*mG*mG | |
| N20_NAA_+1_S_ | mC*mU*mG*rUrGrCrUrGrArCrCrArUrCrGrArCrArArGrGrUrUrUrUrArGr | 682 |
| F7E12_TtoC | ArGrCrUrArGrArArArUrArGrCrArArGrUrUrArArArArUrArArGrGrCrUrA | |
| | rGrUrCrCrGrUrUrArUrCrArArCrUrUrGrArArArArArGrUrGrGrCrArCrCrG | |
| | rArGrUrCrGrGrUrGrCrArGrUrCrCrCrUrUrUrCrUrCrGrUrCrG*mA* | |
| | mU*mG | |

¹For RNA, T is U; U are T in the sequence listing. For each entry, the spacer sequence is underlined and the extension arm is bold. The description indicates the length of the FBS (F) and ET (E) or homology region of the extension arm.
²For the sequences: *, phosphorothioate modification; mN, 2′O-methyl modification; rN, unmodified ribonucleotide; i2FN, Int Fluoro modification. N = A, C, T/U, G.

TABLE 13C
EXEMPLARY SPACER AND PROTOSPACER SEQUENCES FOR EDITING
SERPINA1

| SEQ ID | | SEQ ID | |
|---|---|---|---|
| NO: | SPACER SEQUENCE¹ | NO: | PROTOSPACER SEQUENCE |
| 815 | AAGGCUGUGCUGACCAUCGA | 817 | AAGGCTGTGCTGACCATCGA |
| 816 | CUGUGCUGACCAUCGACAAG | 818 | CTGTGCTGACCATCGACAAG |
| 1273 | CAUAAGGCUGUGCUGACCAUCGA | 1270 | CATAAGGCTGTGCTGACCATCGA |
| 1274 | AUAAGGCUGUGCUGACCAUCGA | 1271 | ATAAGGCTGTGCTGACCATCGA |
| 1275 | UAAGGCUGUGCUGACCAUCGA | 1272 | TAAGGCTGTGCTGACCATCGA |

¹For RNA, U are T in the sequence listing.

TABLE 13D
EXEMPLARY FLAP BINDING SEQUENCES AND TEMPLATES FOR
EDITING SERPINA1

| | | SEQ ID | EDITING | SEQ ID |
|---|---|---|---|---|
| DESCRIPTION | FBS¹ | NO: | TEMPLATE | NO: |
| N20_NNAGAAA_+5_S_F12E8_TtoC | AUGGUCAGCACA | 825 | UCUCGUCG | |
| N20_NNAGAAA_+5_S_F11E8_TtoC | AUGGUCAGCAC | 826 | UCUCGUCG | |
| N20_NNAGAAA_+5_S_F10E8_TtoC | AUGGUCAGCA | 827 | UCUCGUCG | |
| N20_NNAGAAA_+5_S_F9E8_TtoC | AUGGUCAGC | | UCUCGUCG | |
| N20_NNAGAAA_+5_S_F8E8_TtoC | AUGGUCAG | | UCUCGUCG | |
| N20_NNAGAAA_+5_S_F7E8_TtoC | AUGGUCA | | UCUCGUCG | |
| N20_NNAGAAA_+5_S_F12E10_TtoC | AUGGUCAGCACA | 825 | UUUCUCGUCG | 819 |
| N20_NNAGAAA_+5_S_F11E10_TtoC | AUGGUCAGCAC | 826 | UUUCUCGUCG | 819 |
| N20_NNAGAAA_+5_S_F10E10_TtoC | AUGGUCAGCA | 827 | UUUCUCGUCG | 819 |
| N20_NNAGAAA_+5_S_F9E10_TtoC | AUGGUCAGC | | UUUCUCGUCG | 819 |
| N20_NNAGAAA_+5_S_F8E10_TtoC | AUGGUCAG | | UUUCUCGUCG | 819 |
| N20_NNAGAAA_+5_S_F7E10_TtoC | AUGGUCA | | UUUCUCGUCG | 819 |
| N20_NNAGAAA_+5_S_F12E12_TtoC | AUGGUCAGCACA | 825 | CCUUUCUCGUCG | 820 |
| N20_NNAGAAA_+5_S_F11E12_TtoC | AUGGUCAGCAC | 826 | CCUUUCUCGUCG | 820 |
| N20_NNAGAAA_+5_S_F10E12_TtoC | AUGGUCAGCA | 827 | CCUUUCUCGUCG | 820 |
| N20_NNAGAAA_+5_S_F9E12_TtoC | AUGGUCAGC | | CCUUUCUCGUCG | 820 |
| N20_NNAGAAA_+5_S_F8E12_TtoC | AUGGUCAG | | CCUUUCUCGUCG | 820 |
| N20_NNAGAAA_+5_S_F7E12_TtoC | AUGGUCA | | CCUUUCUCGUCG | 820 |
| N20_NNAGAAA_+5_S_F12E14_TtoC | AUGGUCAGCACA | 825 | UCCCUUUCUCGUCG | 821 |
| N20_NNAGAAA_+5_S_F11E14_TtoC | AUGGUCAGCAC | 826 | UCCCUUUCUCGUCG | 821 |
| N20_NNAGAAA_+5_S_F10E14_TtoC | AUGGUCAGCA | 827 | UCCCUUUCUCGUCG | 821 |
| N20_NNAGAAA_+5_S_F9E14_TtoC | AUGGUCAGC | | UCCCUUUCUCGUCG | 821 |
| N20_NNAGAAA_+5_S_F8E14_TtoC | AUGGUCAG | | UCCCUUUCUCGUCG | 821 |
| N20_NNAGAAA_+5_S_F7E14_TtoC | AUGGUCA | | UCCCUUUCUCGUCG | 821 |
| N20_NNAGAAA_+5_S_F12E16_TtoC | AUGGUCAGCACA | 825 | AGUCCCUUUCUCGUCG | 822 |
| N20_NNAGAAA_+5_S_F11E16_TtoC | AUGGUCAGCAC | 826 | AGUCCCUUUCUCGUCG | 822 |
| N20_NNAGAAA_+5_S_F10E16_TtoC | AUGGUCAGCA | 827 | AGUCCCUUUCUCGUCG | 822 |
| N20_NNAGAAA_+5_S_F9E16_TtoC | AUGGUCAGC | | AGUCCCUUUCUCGUCG | 822 |
| N20_NNAGAAA_+5_S_F8E16_TtoC | AUGGUCAG | | AGUCCCUUUCUCGUCG | 822 |
| N20_NNAGAAA_+5_S_F7E16_TtoC | AUGGUCA | | AGUCCCUUUCUCGUCG | 822 |
| N20_NAA_+1_S_F12E4_TtoC | GUCGAUGGUCAG | 828 | UCUC | |
| N20_NAA_+1_S_F11E4_TtoC | GUCGAUGGUCA | 829 | UCUC | |
| N20_NAA_+1_S_F10E4_TtoC | GUCGAUGGUC | 830 | UCUC | |
| N20_NAA_+1_S_F9E4_TtoC | GUCGAUGGU | | UCUC | |
| N20_NAA_+1_S_F8E4_TtoC | GUCGAUGG | | UCUC | |
| N20_NAA_+1_S_F7E4_TtoC | GUCGAUG | | UCUC | |
| N20_NAA_+1_S_F12E6_TtoC | GUCGAUGGUCAG | 828 | UUUCUC | |
| N20_NAA_+1_S_F11E6_TtoC | GUCGAUGGUCA | 829 | UUUCUC | |
| N20_NAA_+1_S_F10E6_TtoC | GUCGAUGGUC | 830 | UUUCUC | |
| N20_NAA_+1_S_F9E6_TtoC | GUCGAUGGU | | UUUCUC | |
| N20_NAA_+1_S_F8E6_TtoC | GUCGAUGG | | UUUCUC | |
| N20_NAA_+1_S_F7E6_TtoC | GUCGAUG | | UUUCUC | |
| N20_NAA_+1_S_F12E8_TtoC | GUCGAUGGUCAG | 828 | CCUUUCUC | |
| N20_NAA_+1_S_F11E8_TtoC | GUCGAUGGUCA | 829 | CCUUUCUC | |
| N20_NAA_+1_S_F10E8_TtoC | GUCGAUGGUC | 830 | CCUUUCUC | |
| N20_NAA_+1_S_F9E8_TtoC | GUCGAUGGU | | CCUUUCUC | |
| N20_NAA_+1_S_F8E8_TtoC | GUCGAUGG | | CCUUUCUC | |
| N20_NAA_+1_S_F7E8_TtoC | GUCGAUG | | CCUUUCUC | |
| N20_NAA_+1_S_F12E10_TtoC | GUCGAUGGUCAG | 828 | UCCCUUUCUC | 823 |
| N20_NAA_+1_S_F11E10_TtoC | GUCGAUGGUCA | 829 | UCCCUUUCUC | 823 |
| N20_NAA_+1_S_F10E10_TtoC | GUCGAUGGUC | 830 | UCCCUUUCUC | 823 |
| N20_NAA_+1_S_F9E10_TtoC | GUCGAUGGU | | UCCCUUUCUC | 823 |
| N20_NAA_+1_S_F8E10_TtoC | GUCGAUGG | | UCCCUUUCUC | 823 |
| N20_NAA_+1_S_F7E10_TtoC | GUCGAUG | | UCCCUUUCUC | 823 |
| N20_NAA_+1_S_F12E12_TtoC | GUCGAUGGUCAG | 828 | AGUCCCUUUCUC | 824 |
| N20_NAA_+1_S_F11E12_TtoC | GUCGAUGGUCA | 829 | AGUCCCUUUCUC | 824 |
| N20_NAA_+1_S_F10E12_TtoC | GUCGAUGGUC | 830 | AGUCCCUUUCUC | 824 |
| N20_NAA_+1_S_F9E12_TtoC | GUCGAUGGU | | AGUCCCUUUCUC | 824 |
| N20_NAA_+1_S_F8E12_TtoC | GUCGAUGG | | AGUCCCUUUCUC | 824 |
| N20_NAA_+1_S_F7E12_TtoC | GUCGAUG | | AGUCCCUUUCUC | 824 |

¹For RNA, T is U; U are T in the sequence listing. The description indicates the length of the FBS (F) and ET (E) or homology region of the extension arm.

TABLE 14A
EXEMPLARY SCAFFOLD VARIANTS

| | | | SEQ ID |
|---|---|---|---|
| NAME | DESCRIPTION | SEQUENCE1 | NO: |
| v0 | wild type | GUUUUUGUACUCUCAAGAAAUUGCAGAAGCUACAAAGAU | 683 |
| | | AAGGCUUCAUGCCGAAAUCAACACCCUGUCAUUUUAUGGC | |
| | | AGGGUGUU | |
| v1 | UA:AU to GC:CG | GUUUGCGUACUCUCAAGAAAUUGCAGAAGCUACGCAGAU | 684 |
| | | AAGGCUUCAUGCCGAAAUCAACACCCUGUCAUUUUAUGGC | |
| | | AGGGUGUU | |
| v2 | RAR trunc 1 | GUUUUUGUACUCUGAAAAGAAGCUACAAAGAUAAGGCUU | 685 |
| | | CAUGCCGAAAUCAACACCCUGUCAUUUUAUGGCAGGGUG | |
| | | UU | |
| v3 | RAR trunc2 + UUCG | GUUUUUGUACGUUCGCGCUACAAAGAUAAGGCUUCAUGC | 686 |
| | | CGAAAUCAACACCCUGUCAUUUUAUGGCAGGGUGUU | |
| v4 | UA:AU + RAR trunc1 | GUUUGCGUACUCUGAAAAGAAGCUACGCAGAUAAGGCUU | 687 |
| | | CAUGCCGAAAUCAACACCCUGUCAUUUUAUGGCAGGGUG | |
| | | UU | |
| v5 | UA:AU + RAR trunc2 | GUUUGCGUACGUUCGCGCUACGCAGAUAAGGCUUCAUGCC | 688 |
| | | GAAAUCAACACCCUGUCAUUUUAUGGCAGGGUGUU | |
| v6 | SL2_trunc1 | GUUUUUGUACUCUCAAGAAAUUGCAGAAGCUACAAAGAU | 689 |
| | | AAGGCUUCAUGCCGAAAUCAACA | |
| v7 | SL2_trunc2 | GUUUUUGUACUCUCAAGAAAUUGCAGAAGCUACAAAGAU | 690 |
| | | AAGGCUUCAUGCCGAAAUCAA | |
| v8 | SL2_trunc3 | GUUUUUGUACUCUCAAGAAAUUGCAGAAGCUACAAAGAU | 691 |
| | | AAGGCUUCAUGCCGAAAUC | |
| v9 | SL2_trunc4 | GUUUUUGUACUCUCAAGAAAUUGCAGAAGCUACAAAGAU | 692 |
| | | AAGGCUUCAUGCCGAAA | |
| v10 | SL2_trunc5 | GUUUUUGUACUCUCAAGAAAUUGCAGAAGCUACAAAGAU | 693 |
| | | AAGGCUUCAUGCCGA | |
| v11 | UA:AU to GC:CG + | GUUUGCGUACUCUCAAGAAAUUGCAGAAGCUACGCAGAU | 694 |
| | SL2_trunc1 | AAGGCUUCAUGCCGAAAUCAACA | |
| v12 | RAR trunc1 + SL2_ | GUUUUUGUACUCUGAAAAGAAGCUACAAAGAUAAGGCUU | 695 |
| | trunc1 | CAUGCCGAAAUCAACA | |
| v13 | RAR trunc2 + UUCG+ | GUUUUUGUACGUUCGCGCUACAAAGAUAAGGCUUCAUGC | 696 |
| | SL2_trunc1 | CGAAAUCAACA | |
| v14 | UA:AU+RAR trunc1 + | GUUUGCGUACUCUGAAAAGAAGCUACGCAGAUAAGGCUU | 697 |
| | SL2_trunc1 | CAUGCCGAAAUCAACA | |
| v15 | UA:AU+RAR trunc2 + | GUUUGCGUACGUUCGCGCUACGCAGAUAAGGCUUCAUGCC | 698 |
| | SL2_trunc1 | GAAAUCAACA | |
| v16 | UA:AU to GC:CG + | GUUUGCGUACUCUCAAGAAAUUGCAGAAGCUACGCAGAU | 699 |
| | SL2_trunc2 | AAGGCUUCAUGCCGAAAUCAA | |
| v17 | RAR trunc1 + | GUUUUUGUACUCUGAAAAGAAGCUACAAAGAUAAGGCUU | 700 |
| | SL2_trunc2 | CAUGCCGAAAUCAA | |
| v18 | RAR trunc2 + UUCG + | GUUUUUGUACGUUCGCGCUACAAAGAUAAGGCUUCAUGC | 701 |
| | SL2 _trunc2 | CGAAAUCAA | |
| v19 | UA:AU + RAR trunc1 + | GUUUGCGUACUCUGAAAAGAAGCUACGCAGAUAAGGCUU | 702 |
| | SL2_trunc2 | CAUGCCGAAAUCAA | |
| v20 | UA:AU+RAR trunc2+ | GUUUGCGUACGUUCGCGCUACGCAGAUAAGGCUUCAUGCC | 703 |
| | SL2_trunc2 | GAAAUCAA | |
| v21 | UA:AU to GC:CG + | GUUUGCGUACUCUCAAGAAAUUGCAGAAGCUACGCAGAU | 704 |
| | SL2_trunc3 | AAGGCUUCAUGCCGAAAUC | |
| v22 | RAR trunc1 + | GUUUUUGUACUCUGAAAAGAAGCUACAAAGAUAAGGCUU | 705 |
| | SL2_trunc3 | CAUGCCGAAAUC | |
| v23 | RAR trunc2 + UUCG + | GUUUUUGUACGUUCGCGCUACAAAGAUAAGGCUUCAUGC | 706 |
| | SL2_trunc3 | CGAAAUC | |
| v24 | UA:AU + RAR trunc1 + | GUUUGCGUACUCUGAAAAGAAGCUACGCAGAUAAGGCUU | 707 |
| | SL2_trunc3 | CAUGCCGAAAUC | |
| v25 | UA:AU + RAR trunc2 + | GUUUGCGUACGUUCGCGCUACGCAGAUAAGGCUUCAUGCC | 708 |
| | SL2_trunc3 | GAAAUC | |
| v26 | UA:AU to GC:CG + | GUUUGCGUACUCUCAAGAAAUUGCAGAAGCUACGCAGAU | 709 |
| | SL2_trunc4 | AAGGCUUCAUGCCGAAA | |
| v27 | RAR trunc 1 + | GUUUUUGUACUCUGAAAAGAAGCUACAAAGAUAAGGCUU | 710 |
| | SL2_trunc4 | CAUGCCGAAA | |
| v28 | RAR trunc2 + UUCG + | GUUUUUGUACGUUCGCGCUACAAAGAUAAGGCUUCAUGC | 711 |
| | SL2_trunc4 | CGAAA | |
| v29 | UA:AU + RAR trunc1 + | GUUUGCGUACUCUGAAAAGAAGCUACGCAGAUAAGGCUU | 712 |
| | SL2_trunc4 | CAUGCCGAAA | |
| v30 | UA:AU + RAR trunc2 + | GUUUGCGUACGUUCGCGCUACGCAGAUAAGGCUUCAUGCC | 713 |
| | SL2_trunc4 | GAAA | |
| v31 | UA:AU to GC:CG + | GUUUGCGUACUCUCAAGAAAUUGCAGAAGCUACGCAGAU | 714 |
| | SL2_trunc5 | AAGGCUUCAUGCCGA | |
| v32 | RAR trunc1 + | GUUUUUGUACUCUGAAAAGAAGCUACAAAGAUAAGGCUU | 715 |
| | SL2_trunc5 | CAUGCCGA | |
| v33 | RAR trunc2 + UUCG + | GUUUUUGUACGUUCGCGCUACAAAGAUAAGGCUUCAUGC | 716 |
| | SL2_trunc5 | CGA | |
| v34 | UA:AU + RAR trunc1 + | GUUUGCGUACUCUGAAAAGAAGCUACGCAGAUAAGGCUU | 717 |
| | SL2_trunc5 | CAUGCCGA | |
| v35 | UA:AU + RAR trunc2 + | GUUUGCGUACGUUCGCGCUACGCAGAUAAGGCUUCAUGCC | 718 |
| | SL2_trunc5 | GA | |

¹For RNA, T is U; U are T in the sequence listing.

TABLE 14B
EXEMPLARY tagRNA SCAFFOLD VARIANTS

| | | | SEQ ID |
|---|---|---|---|
| NAME | DESCRIPTION | SEQUENCE^{1,} | NO: |
| v0 | wild type | AAGGCUGUGCUGACCAUCGAGUUUUUGUACUC | 719 |
| | | UCAAGAAAUUGCAGAAGCUACAAAGAUAAGGC | |
| | | UUCAUGCCGAAAUCAACACCCUGUCAUUUUAUG | |
| | | GCAGGGUGUUUCUCGUCGAUGGUCAG | |
| v1 | UA:AU to GC:CG | AAGGCUGUGCUGACCAUCGAGUUUGCGUACUC | 720 |
| | | UCAAGAAAUUGCAGAAGCUACGCAGAUAAGGC | |
| | | UUCAUGCCGAAAUCAACACCCUGUCAUUUUAUG | |
| | | GCAGGGUGUUUCUCGUCGAUGGUCAG | |
| v2 | RAR trunc 1 | AAGGCUGUGCUGACCAUCGAGUUUUUGUACUC | 721 |
| | | UGAAAAGAAGCUACAAAGAUAAGGCUUCAUGC | |
| | | CGAAAUCAACACCCUGUCAUUUUAUGGCAGGG | |
| | | UGUUUCUCGUCGAUGGUCAG | |
| v3 | RAR trunc2 + UUCG | AAGGCUGUGCUGACCAUCGAGUUUUUGUACGU | 722 |
| | | UCGCGCUACAAAGAUAAGGCUUCAUGCCGAAA | |
| | | UCAACACCCUGUCAUUUUAUGGCAGGGUGUUU | |
| | | CUCGUCGAUGGUCAG | |
| v4 | UA:AU + RAR trunc1 | AAGGCUGUGCUGACCAUCGAGUUUGCGUACUC | 723 |
| | | UGAAAAGAAGCUACGCAGAUAAGGCUUCAUGC | |
| | | CGAAAUCAACACCCUGUCAUUUUAUGGCAGGG | |
| | | UGUUUCUCGUCGAUGGUCAG | |
| v5 | UA:AU + RAR trunc2 | AAGGCUGUGCUGACCAUCGAGUUUGCGUACGU | 724 |
| | | UCGCGCUACGCAGAUAAGGCUUCAUGCCGAAAU | |
| | | CAACACCCUGUCAUUUUAUGGCAGGGUGUUUC | |
| | | UCGUCGAUGGUCAG | |
| v6 | SL2_trunc1 | AAGGCUGUGCUGACCAUCGAGUUUUUGUACUC | 725 |
| | | UCAAGAAAUUGCAGAAGCUACAAAGAUAAGGC | |
| | | UUCAUGCCGAAAUCAACAUCUCGUCGAUGGUC | |
| | | AG | |
| v7 | SL2_trunc2 | AAGGCUGUGCUGACCAUCGAGUUUUUGUACUC | 726 |
| | | UCAAGAAAUUGCAGAAGCUACAAAGAUAAGGC | |
| | | UUCAUGCCGAAAUCAAUCUCGUCGAUGGUCAG | |
| v8 | SL2_trunc3 | AAGGCUGUGCUGACCAUCGAGUUUUUGUACUC | 727 |
| | | UCAAGAAAUUGCAGAAGCUACAAAGAUAAGGC | |
| | | UUCAUGCCGAAAUCUCUCGUCGAUGGUCAG | |
| v9 | SL2_trunc4 | AAGGCUGUGCUGACCAUCGAGUUUUUGUACUC | 728 |
| | | UCAAGAAAUUGCAGAAGCUACAAAGAUAAGGC | |
| | | UUCAUGCCGAAAUCUCGUCGAUGGUCAG | |
| v10 | SL2_trunc5 | AAGGCUGUGCUGACCAUCGAGUUUUUGUACUC | 729 |
| | | UCAAGAAAUUGCAGAAGCUACAAAGAUAAGGC | |
| | | UUCAUGCCGAUCUCGUCGAUGGUCAG | |
| v11 | UA:AU to GC:CG + | AAGGCUGUGCUGACCAUCGAGUUUGCGUACUC | 730 |
| | SL2_trunc1 | UCAAGAAAUUGCAGAAGCUACGCAGAUAAGGC | |
| | | UUCAUGCCGAAAUCAACAUCUCGUCGAUGGUC | |
| | | AG | |
| v12 | RAR trunc1 + SL2_trunc1 | AAGGCUGUGCUGACCAUCGAGUUUUUGUACUC | 731 |
| | | UGAAAAGAAGCUACAAAGAUAAGGCUUCAUGC | |
| | | CGAAAUCAACAUCUCGUCGAUGGUCAG | |
| v13 | RAR trunc2 + UUCG + | AAGGCUGUGCUGACCAUCGAGUUUUUGUACGU | 732 |
| | SL2_trunc1 | UCGCGCUACAAAGAUAAGGCUUCAUGCCGAAA | |
| | | UCAACAUCUCGUCGAUGGUCAG | |
| v14 | UA:AU + RAR trunc1 + | AAGGCUGUGCUGACCAUCGAGUUUGCGUACUC | 733 |
| | SL2_trunc1 | UGAAAAGAAGCUACGCAGAUAAGGCUUCAUGC | |
| | | CGAAAUCAACAUCUCGUCGAUGGUCAG | |
| v15 | UA:AU + RAR trunc2 + | AAGGCUGUGCUGACCAUCGAGUUUGCGUACGU | 734 |
| | SL2_trunc1 | UCGCGCUACGCAGAUAAGGCUUCAUGCCGAAAU | |
| | | CAACAUCUCGUCGAUGGUCAG | |
| v16 | UA:AU to GC:CG + | AAGGCUGUGCUGACCAUCGAGUUUGCGUACUC | 735 |
| | SL2_trunc2 | UCAAGAAAUUGCAGAAGCUACGCAGAUAAGGC | |
| | | UUCAUGCCGAAAUCAAUCUCGUCGAUGGUCAG | |
| v17 | RAR trunc1 + SL2_trunc2 | AAGGCUGUGCUGACCAUCGAGUUUUUGUACUC | 736 |
| | | UGAAAAGAAGCUACAAAGAUAAGGCUUCAUGC | |
| | | CGAAAUCAAUCUCGUCGAUGGUCAG | |
| v18 | RAR trunc2 + UUCG + | AAGGCUGUGCUGACCAUCGAGUUUUUGUACGU | 737 |
| | SL2_trunc2 | UCGCGCUACAAAGAUAAGGCUUCAUGCCGAAA | |
| | | UCAAUCUCGUCGAUGGUCAG | |
| v19 | UA:AU + RAR trunc1 + | AAGGCUGUGCUGACCAUCGAGUUUGCGUACUC | 738 |
| | SL2_trunc2 | UGAAAAGAAGCUACGCAGAUAAGGCUUCAUGC | |
| | | CGAAAUCAAUCUCGUCGAUGGUCAG | |
| v20 | UA:AU + RAR trunc2 + | AAGGCUGUGCUGACCAUCGAGUUUGCGUACGU | 739 |
| | SL2_trunc2 | UCGCGCUACGCAGAUAAGGCUUCAUGCCGAAAU | |
| | | CAAUCUCGUCGAUGGUCAG | |
| v21 | UA:AU to GC:CG + SL2_trunc3 | AAGGCUGUGCUGACCAUCGAGUUUGCGUACUC | 740 |
| | | UCAAGAAAUUGCAGAAGCUACGCAGAUAAGGC | |
| | | UUCAUGCCGAAAUCUCUCGUCGAUGGUCAG | |
| v22 | RAR trunc1 + SL2_trunc3 | AAGGCUGUGCUGACCAUCGAGUUUUUGUACUC | 741 |
| | | UGAAAAGAAGCUACAAAGAUAAGGCUUCAUGC | |
| | | CGAAAUCUCUCGUCGAUGGUCAG | |
| v23 | RAR trunc2 + UUCG + | AAGGCUGUGCUGACCAUCGAGUUUUUGUACGU | 742 |
| | SL2_trunc3 | UCGCGCUACAAAGAUAAGGCUUCAUGCCGAAA | |
| | | UCUCUCGUCGAUGGUCAG | |
| v24 | UA:AU + RAR trunc1 + | AAGGCUGUGCUGACCAUCGAGUUUGCGUACUC | 743 |
| | SL2_trunc3 | UGAAAAGAAGCUACGCAGAUAAGGCUUCAUGC | |
| | | CGAAAUCUCUCGUCGAUGGUCAG | |
| v25 | UA:AU + RAR trunc2 + | AAGGCUGUGCUGACCAUCGAGUUUGCGUACGU | 744 |
| | SL2_trunc3 | UCGCGCUACGCAGAUAAGGCUUCAUGCCGAAAU | |
| | | CUCUCGUCGAUGGUCAG | |
| v26 | UA:AU to GC:CG + SL2_trunc4 | AAGGCUGUGCUGACCAUCGAGUUUGCGUACUC | 745 |
| | | UCAAGAAAUUGCAGAAGCUACGCAGAUAAGGC | |
| | | UUCAUGCCGAAAUCUCGUCGAUGGUCAG | |
| v27 | RAR trunc1 + SL2_trunc4 | AAGGCUGUGCUGACCAUCGAGUUUUUGUACUC | 746 |
| | | UGAAAAGAAGCUACAAAGAUAAGGCUUCAUGC | |
| | | CGAAAUCUCGUCGAUGGUCAG | |
| v28 | RAR trunc2 + UUCG + | AAGGCUGUGCUGACCAUCGAGUUUUUGUACGU | 747 |
| | SL2_trunc4 | UCGCGCUACAAAGAUAAGGCUUCAUGCCGAAA | |
| | | UCUCGUCGAUGGUCAG | |
| v29 | UA:AU + RAR trunc 1 + | AAGGCUGUGCUGACCAUCGAGUUUGCGUACUC | 748 |
| | SL2_trunc4 | UGAAAAGAAGCUACGCAGAUAAGGCUUCAUGC | |
| | | CGAAAUCUCGUCGAUGGUCAG | |
| v30 | UA:AU + RAR trunc2 + | AAGGCUGUGCUGACCAUCGAGUUUGCGUACGU | 749 |
| | SL2_trunc4 | UCGCGCUACGCAGAUAAGGCUUCAUGCCGAAAU | |
| | | CUCGUCGAUGGUCAG | |
| v31 | UA:AU to GC:CG + SL2_trunc5 | AAGGCUGUGCUGACCAUCGAGUUUGCGUACUC | 750 |
| | | UCAAGAAAUUGCAGAAGCUACGCAGAUAAGGC | |
| | | UUCAUGCCGAUCUCGUCGAUGGUCAG | |
| v32 | RAR trunc1 + SL2_trunc5 | AAGGCUGUGCUGACCAUCGAGUUUUUGUACUC | 751 |
| | | UGAAAAGAAGCUACAAAGAUAAGGCUUCAUGC | |
| | | CGAUCUCGUCGAUGGUCAG | |
| v33 | RAR trunc2 + UUCG + | AAGGCUGUGCUGACCAUCGAGUUUUUGUACGU | 752 |
| | SL2_trunc5 | UCGCGCUACAAAGAUAAGGCUUCAUGCCGAUC | |
| | | UCGUCGAUGGUCAG | |
| v34 | UA:AU + RAR trunc1 + | AAGGCUGUGCUGACCAUCGAGUUUGCGUACUC | 753 |
| | SL2_trunc5 | UGAAAAGAAGCUACGCAGAUAAGGCUUCAUGC | |
| | | CGAUCUCGUCGAUGGUCAG | |
| v35 | UA:AU + RAR trunc2 + | AAGGCUGUGCUGACCAUCGAGUUUGCGUACGU | 754 |
| | SL2_trunc5 | UCGCGCUACGCAGAUAAGGCUUCAUGCCGAUCU | |
| | | CGUCGAUGGUCAG | |

¹For RNA, T is U; U are T in the sequence listing. For each entry, the spacer sequence is underlined and the extension arm is bold.

TABLE 14C
EXEMPLARY MODIFIED tagRNA SCAFFOLD VARIANTS

| | | | SEQ ID |
|---|---|---|---|
| NAME | DESCRIPTION | SEQUENCE^{1,2} | NO: |
| v0 | wild type | mA*mA*mG*rGrCrUrGrUrGrCrUrGrArCrCrArUrCrGr | 755 |
| | | ArGrUrUrUrUrUrGrUrArCrUrCrUrCrArArGrArArArUr | |
| | | UrGrCrArGrArArGrCrUrArCrArArArGrArUrArArGrGr | |
| | | CrUrUrCrArUrGrCrCrGrArArArUrCrArArCrArCrCrCrU | |
| | | rGrUrCrArUrUrUrUrArUrGrGrCrArGrGrGrUrGrUrUrU | |
| | | rCrUrCrGrUrCrGrArUrGrGrU*mC*mA*mG | |
| v1 | UA:AU to GC:CG | mA*mA*mG*rGrCrUrGrUrGrCrUrGrArCrCrArUrCrGr | 756 |
| | | ArGrUrUrUrGrCrGrUrArCrUrCrUrCrArArGrArArArUr | |
| | | UrGrCrArGrArArGrCrUrArCrGrCrArGrArUrArArGrGr | |
| | | CrUrUrCrArUrGrCrCrGrArArArUrCrArArCrArCrCrCrU | |
| | | rGrUrCrArUrUrUrUrArUrGrGrCrArGrGrGrUrGrUrUrU | |
| | | rCrUrCrGrUrCrGrArUrGrGrU*mC*mA*mG | |
| v2 | RAR trunc1 | mA*mA*mG*rGrCrUrGrUrGrCrUrGrArCrCrArUrCrGr | 757 |
| | | ArGrUrUrUrUrUrGrUrArCrUrCrUrGrArArArArGrArAr | |
| | | GrCrUrArCrArArArGrArUrArArGrGrCrUrUrCrArUrGr | |
| | | CrCrGrArArArUrCrArArCrArCrCrCrUrGrUrCrArUrUrU | |
| | | rUrArUrGrGrCrArGrGrGrUrGrUrUrUrCrUrCrGrUrCr | |
| | | GrArUrGrGrU*mC*mA*mG | |
| v3 | RAR trunc2 + UUCG | mA*mA*mG*rGrCrUrGrUrGrCrUrGrArCrCrArUrCrGr | 758 |
| | | ArGrUrUrUrUrUrGrUrArCrGrUrUrCrGrCrGrCrUrArCr | |
| | | ArArArGrArUrArArGrGrCrUrUrCrArUrGrCrCrGrArAr | |
| | | ArUrCrArArCrArCrCrCrUrGrUrCrArUrUrUrUrArUrGrG | |
| | | rCrArGrGrGrUrGrUrUrUrCrUrCrGrUrCrGrArUrGr | |
| | | GrU*mC*mA*mG | |
| v4 | UA:AU + RAR trunc1 | mA*mA*mG*rGrCrUrGrUrGrCrUrGrArCrCrArUrCrGr | 759 |
| | | ArGrUrUrUrGrCrGrUrArCrUrCrUrGrArArArArGrArAr | |
| | | GrCrUrArCrGrCrArGrArUrArArGrGrCrUrUrCrArUrGrC | |
| | | rCrGrArArArUrCrArArCrArCrCrCrUrGrUrCrArUrUrUr | |
| | | UrArUrGrGrCrArGrGrGrUrGrUrUrUrCrUrCrGrUrCr | |
| | | GrArUrGrGrU*mC*mA*mG | |
| v5 | UA:AU + RAR trunc2 | mA*mA*mG*rGrCrUrGrUrGrCrUrGrArCrCrArUrCrGr | 760 |
| | | ArGrUrUrUrGrCrGrUrArCrGrUrUrCrGrCrGrCrUrArCrG | |
| | | rCrArGrArUrArArGrGrCrUrUrCrArUrGrCrCrGrArArAr | |
| | | UrCrArArCrArCrCrCrUrGrUrCrArUrUrUrUrArUrGrGrC | |
| | | rArGrGrGrUrGrUrUrUrCrUrCrGrUrCrGrArUrGrGr | |
| | | U*mC*mA*mG | |
| v6 | SL2_trunc1 | mA*mA*mG*rGrCrUrGrUrGrCrUrGrArCrCrArUrCrGr | 761 |
| | | ArGrUrUrUrUrUrGrUrArCrUrCrUrCrArArGrArArArUr | |
| | | UrGrCrArGrArArGrCrUrArCrArArArGrArUrArArGrGr | |
| | | CrUrUrCrArUrGrCrCrGrArArArUrCrArArCrArUrCrUr | |
| | | CrGrUrCrGrArUrGrGrU*mC*mA*mG | |
| v7 | SL2_trunc2 | mA*mA*mG*rGrCrUrGrUrGrCrUrGrArCrCrArUrCrGr | 762 |
| | | ArGrUrUrUrUrUrGrUrArCrUrCrUrCrArArGrArArArUr | |
| | | UrGrCrArGrArArGrCrUrArCrArArArGrArUrArArGrGr | |
| | | CrUrUrCrArUrGrCrCrGrArArArUrCrArArUrCrUrCrG | |
| | | rUrCrGrArUrGrGrU*mC*mA*mG | |
| v8 | SL2_trunc3 | mA*mA*mG*rGrCrUrGrUrGrCrUrGrArCrCrArUrCrGr | 763 |
| | | ArGrUrUrUrUrUrGrUrArCrUrCrUrCrArArGrArArArUr | |
| | | UrGrCrArGrArArGrCrUrArCrArArArGrArUrArArGrGr | |
| | | CrUrUrCrArUrGrCrCrGrArArArUrCrUrCrUrCrGrUrC | |
| | | rGrArUrGrGrU*mC*mA*mG | |
| v9 | SL2_trunc4 | mA*mA*mG*rGrCrUrGrUrGrCrUrGrArCrCrArUrCrGr | 764 |
| | | ArGrUrUrUrUrUrGrUrArCrUrCrUrCrArArGrArArArUr | |
| | | UrGrCrArGrArArGrCrUrArCrArArArGrArUrArArGrGr | |
| | | CrUrUrCrArUrGrCrCrGrArArArUrCrUrCrGrUrCrGr | |
| | | ArUrGrGrU*mC*mA*mG | |
| v10 | SL2_trunc5 | mA*mA*mG*rGrCrUrGrUrGrCrUrGrArCrCrArUrCrGr | 765 |
| | | ArGrUrUrUrUrUrGrUrArCrUrCrUrCrArArGrArArArUr | |
| | | UrGrCrArGrArArGrCrUrArCrArArArGrArUrArArGrGr | |
| | | CrUrUrCrArUrGrCrCrGrArUrCrUrCrGrUrCrGrArUr | |
| | | GrGrU*mC*mA*mG | |
| v11 | UA:AU to GC:CG + | mA*mA*mG*rGrCrUrGrUrGrCrUrGrArCrCrArUrCrGr | 766 |
| | SL2_trunc1 | ArGrUrUrUrGrCrGrUrArCrUrCrUrCrArArGrArArArUr | |
| | | UrGrCrArGrArArGrCrUrArCrGrCrArGrArUrArArGrGr | |
| | | CrUrUrCrArUrGrCrCrGrArArArUrCrArArCrArUrCrUr | |
| | | CrGrUrCrGrArUrGrGrU*mC*mA*mG | |
| v12 | RAR trunc1 + | mA*mA*mG*rGrCrUrGrUrGrCrUrGrArCrCrArUrCrGr | 767 |
| | SL2_trunc1 | ArGrUrUrUrUrUrGrUrArCrUrCrUrGrArArArArGrArAr | |
| | | GrCrUrArCrArArArGrArUrArArGrGrCrUrUrCrArUrGr | |
| | | CrCrGrArArArUrCrArArCrArUrCrUrCrGrUrCrGrAr | |
| | | UrGrGrU*mC*mA*mG | |
| v13 | RAR trunc2 + UUCG + | mA*mA*mG*rGrCrUrGrUrGrCrUrGrArCrCrArUrCrGr | 768 |
| | SL2 trunc1 | ArGrUrUrUrUrUrGrUrArCrGrUrUrCrGrCrGrCrUrArCr | |
| | | ArArArGrArUrArArGrGrCrUrUrCrArUrGrCrCrGrArAr | |
| | | ArUrCrArArCrArUrCrUrCrGrUrCrGrArUrGrGrU* | |
| | | mC*mA*mG | |
| v14 | UA:AU + RAR trunc1 + | mA*mA*mG*rGrCrUrGrUrGrCrUrGrArCrCrArUrCrGr | 769 |
| | SL2_trunc1 | ArGrUrUrUrGrCrGrUrArCrUrCrUrGrArArArArGrArAr | |
| | | GrCrUrArCrGrCrArGrArUrArArGrGrCrUrUrCrArUrGrC | |
| | | rCrGrArArArUrCrArArCrArUrCrUrCrGrUrCrGrArU | |
| | | rGrGrU*mC*mA*mG | |
| v15 | UA:AU + RAR trunc2 + | mA*mA*mG*rGrCrUrGrUrGrCrUrGrArCrCrArUrCrGr | 770 |
| | SL2_trunc1 | ArGrUrUrUrGrCrGrUrArCrGrUrUrCrGrCrGrCrUrArCrG | |
| | | rCrArGrArUrArArGrGrCrUrUrCrArUrGrCrCrGrArArAr | |
| | | UrCrArArCrArUrCrUrCrGrUrCrGrArUrGrGrU*mC | |
| | | *mA*mG | |
| v16 | UA:AU to GC:CG + | mA*mA*mG*rGrCrUrGrUrGrCrUrGrArCrCrArUrCrGr | 771 |
| | SL2_trunc2 | ArGrUrUrUrGrCrGrUrArCrUrCrUrCrArArGrArArArUr | |
| | | UrGrCrArGrArArGrCrUrArCrGrCrArGrArUrArArGrGr | |
| | | CrUrUrCrArUrGrCrCrGrArArArUrCrArArUrCrUrCrG | |
| | | rUrCrGrArUrGrGrU*mC*mA*mG | |
| v17 | RAR trunc 1 + | mA*mA*mG*rGrCrUrGrUrGrCrUrGrArCrCrArUrCrGr | 772 |
| | SL2_trunc2 | ArGrUrUrUrUrUrGrUrArCrUrCrUrGrArArArArGrArAr | |
| | | GrCrUrArCrArArArGrArUrArArGrGrCrUrUrCrArUrGr | |
| | | CrCrGrArArArUrCrArArUrCrUrCrGrUrCrGrArUrGr | |
| | | GrU*mC*mA*mG | |
| v18 | RAR trunc2 + UUCG + | mA*mA*mG*rGrCrUrGrUrGrCrUrGrArCrCrArUrCrGr | 773 |
| | SL2_trunc2 | ArGrUrUrUrUrUrGrUrArCrGrUrUrCrGrCrGrCrUrArCr | |
| | | ArArArGrArUrArArGrGrCrUrUrCrArUrGrCrCrGrArAr | |
| | | ArUrCrArArUrCrUrCrGrUrCrGrArUrGrGrU*mC* | |
| | | mA*mG | |
| v19 | UA:AU + RAR trunc1 + | mA*mA*mG*rGrCrUrGrUrGrCrUrGrArCrCrArUrCrGr | 774 |
| | SL2_trunc2 | ArGrUrUrUrGrCrGrUrArCrUrCrUrGrArArArArGrArAr | |
| | | GrCrUrArCrGrCrArGrArUrArArGrGrCrUrUrCrArUrGrC | |
| | | rCrGrArArArUrCrArArUrCrUrCrGrUrCrGrArUrGrG | |
| | | rU*mC*mA*mG | |
| v20 | UA:AU + RAR trunc2+ | mA*mA*mG*rGrCrUrGrUrGrCrUrGrArCrCrArUrCrGr | 775 |
| | SL2_trunc2 | ArGrUrUrUrGrCrGrUrArCrGrUrUrCrGrCrGrCrUrArCrG | |
| | | rCrArGrArUrArArGrGrCrUrUrCrArUrGrCrCrGrArArAr | |
| | | UrCrArArUrCrUrCrGrUrCrGrArUrGrGrU*mC*mA | |
| | | *mG | |
| v21 | UA:AU to GC:CG + | mA*mA*mG*rGrCrUrGrUrGrCrUrGrArCrCrArUrCrGr | 776 |
| | SL2_trunc3 | ArGrUrUrUrGrCrGrUrArCrUrCrUrCrArArGrArArArUr | |
| | | UrGrCrArGrArArGrCrUrArCrGrCrArGrArUrArArGrGr | |
| | | CrUrUrCrArUrGrCrCrGrArArArUrCrUrCrUrCrGrUrC | |
| | | rGrArUrGrGrU*mC*mA*mG | |
| v22 | RAR trunc1 + | mA*mA*mG*rGrCrUrGrUrGrCrUrGrArCrCrArUrCrGr | 777 |
| | SL2_trunc3 | ArGrUrUrUrUrUrGrUrArCrUrCrUrGrArArArArGrArAr | |
| | | GrCrUrArCrArArArGrArUrArArGrGrCrUrUrCrArUrGr | |
| | | CrCrGrArArArUrCrUrCrUrCrGrUrCrGrArUrGrGrU | |
| | | *mC*mA*mG | |
| v23 | RAR trunc2 + UUCG + | mA*mA*mG*rGrCrUrGrUrGrCrUrGrArCrCrArUrCrGr | 778 |
| | SL2_trunc3 | ArGrUrUrUrUrUrGrUrArCrGrUrUrCrGrCrGrCrUrArCr | |
| | | ArArArGrArUrArArGrGrCrUrUrCrArUrGrCrCrGrArAr | |
| | | ArUrCrUrCrUrCrGrUrCrGrArUrGrGrU*mC*mA*m | |
| | | G | |
| v24 | UA:AU + RAR trunc1 + | mA*mA*mG*rGrCrUrGrUrGrCrUrGrArCrCrArUrCrGr | 779 |
| | SL2_trunc3 | ArGrUrUrUrGrCrGrUrArCrUrCrUrGrArArArArGrArAr | |
| | | GrCrUrArCrGrCrArGrArUrArArGrGrCrUrUrCrArUrGrC | |
| | | rCrGrArArArUrCrUrCrUrCrGrUrCrGrArUrGrGrU* | |
| | | mC*mA*mG | |
| v25 | UA:AU + RAR trunc2 + | mA*mA*mG*rGrCrUrGrUrGrCrUrGrArCrCrArUrCrGr | 780 |
| | SL2_trunc3 | ArGrUrUrUrGrCrGrUrArCrGrUrUrCrGrCrGrCrUrArCrG | |
| | | rCrArGrArUrArArGrGrCrUrUrCrArUrGrCrCrGrArArAr | |
| | | UrCrUrCrUrCrGrUrCrGrArUrGrGrU*mC*mA*mG | |
| v26 | UA:AU to GC:CG + | mA*mA*mG*rGrCrUrGrUrGrCrUrGrArCrCrArUrCrGr | 781 |
| | SL2_trunc4 | ArGrUrUrUrGrCrGrUrArCrUrCrUrCrArArGrArArArUr | |
| | | UrGrCrArGrArArGrCrUrArCrGrCrArGrArUrArArGrGr | |
| | | CrUrUrCrArUrGrCrCrGrArArArUrCrUrCrGrUrCrGr | |
| | | ArUrGrGrU*mC*mA*mG | |
| v27 | RAR trunc 1 + | mA*mA*mG*rGrCrUrGrUrGrCrUrGrArCrCrArUrCrGr | 782 |
| | SL2_trunc4 | ArGrUrUrUrUrUrGrUrArCrUrCrUrGrArArArArGrArAr | |
| | | GrCrUrArCrArArArGrArUrArArGrGrCrUrUrCrArUrGr | |
| | | CrCrGrArArArUrCrUrCrGrUrCrGrArUrGrGrU*mC | |
| | | *mA*mG | |
| v28 | RAR trunc2 + UUCG + | mA*mA*mG*rGrCrUrGrUrGrCrUrGrArCrCrArUrCrGr | 783 |
| | SL2_trunc4 | ArGrUrUrUrUrUrGrUrArCrGrUrUrCrGrCrGrCrUrArCr | |
| | | ArArArGrArUrArArGrGrCrUrUrCrArUrGrCrCrGrArAr | |
| | | ArUrCrUrCrGrUrCrGrArUrGrGrU*mC*mA*mG | |
| v29 | UA:AU + RAR trunc1 + | mA*mA*mG*rGrCrUrGrUrGrCrUrGrArCrCrArUrCrGr | 784 |
| | SL2_trunc4 | ArGrUrUrUrGrCrGrUrArCrUrCrUrGrArArArArGrArAr | |
| | | GrCrUrArCrGrCrArGrArUrArArGrGrCrUrUrCrArUrGrC | |
| | | rCrGrArArArUrCrUrCrGrUrCrGrArUrGrGrU*mC* | |
| | | mA*mG | |
| v30 | UA:AU + RAR trunc2 + | mA*mA*mG*rGrCrUrGrUrGrCrUrGrArCrCrArUrCrGr | 785 |
| | SL2_trunc4 | ArGrUrUrUrGrCrGrUrArCrGrUrUrCrGrCrGrCrUrArCrG | |
| | | rCrArGrArUrArArGrGrCrUrUrCrArUrGrCrCrGrArArAr | |
| | | UrCrUrCrGrUrCrGrArUrGrGrU*mC*mA*mG | |
| v31 | UA:AU to GC:CG + | mA*mA*mG*rGrCrUrGrUrGrCrUrGrArCrCrArUrCrGr | 786 |
| | SL2_trunc5 | ArGrUrUrUrGrCrGrUrArCrUrCrUrCrArArGrArArArUr | |
| | | UrGrCrArGrArArGrCrUrArCrGrCrArGrArUrArArGrGr | |
| | | CrUrUrCrArUrGrCrCrGrArUrCrUrCrGrUrCrGrArUr | |
| | | GrGrU*mC*mA*mG | |
| v32 | RAR trunc1 + | mA*mA*mG*rGrCrUrGrUrGrCrUrGrArCrCrArUrCrGr | 787 |
| | SL2_trunc5 | ArGrUrUrUrUrUrGrUrArCrUrCrUrGrArArArArGrArAr | |
| | | GrCrUrArCrArArArGrArUrArArGrGrCrUrUrCrArUrGr | |
| | | CrCrGrArUrCrUrCrGrUrCrGrArUrGrGrU*mC*mA | |
| | | *mG | |
| v33 | RAR trunc2 + UUCG + | mA*mA*mG*rGrCrUrGrUrGrCrUrGrArCrCrArUrCrGr | 788 |
| | SL2_trunc5 | ArGrUrUrUrUrUrGrUrArCrGrUrUrCrGrCrGrCrUrArCr | |
| | | ArArArGrArUrArArGrGrCrUrUrCrArUrGrCrCrGrArUr | |
| | | CrUrCrGrUrCrGrArUrGrGrU*mC*mA*mG | |
| v34 | UA:AU + RAR trunc1 + | mA*mA*mG*rGrCrUrGrUrGrCrUrGrArCrCrArUrCrGr | 789 |
| | SL2_trunc5 | ArGrUrUrUrGrCrGrUrArCrUrCrUrGrArArArArGrArAr | |
| | | GrCrUrArCrGrCrArGrArUrArArGrGrCrUrUrCrArUrGrC | |
| | | rCrGrArUrCrUrCrGrUrCrGrArUrGrGrU*mC*mA* | |
| | | mG | |
| v35 | UA:AU + RAR trunc2 + | mA*mA*mG*rGrCrUrGrUrGrCrUrGrArCrCrArUrCrGr | 790 |
| | SL2 trunc5 | ArGrUrUrUrGrCrGrUrArCrGrUrUrCrGrCrGrCrUrArCrG | |
| | | rCrArGrArUrArArGrGrCrUrUrCrArUrGrCrCrGrArUrCr | |
| | | UrCrGrUrCrGrArUrGrGrU*mC*mA*mG | |

¹For RNA, T is U; U are T in the sequence listing. For each entry, the spacer sequence is underlined and the extension arm is bold. 2 For the sequences: *, phosphorothioate modification; mN, 2′O-methyl modification; rN, unmodified ribonucleotide; i2FN, Int Fluoro modification. N = A, C, T/U, G.

[0244] In some embodiments, the gRNAs or tagRNAs described herein can be produced by in vitro transcription (IVT), synthetic and/or chemical synthesis methods, or a combination thereof. One or more of enzymatic IVT, solid-phase, liquid-phase, combined synthetic methods, small region synthesis, and ligation methods can be utilized. In some embodiments, the gRNAs or tagRNAs are made using IVT enzymatic synthesis methods. Methods of making polynucleotides by IVT are known in the art and are described in WO2013/151666. Polynucleotides constructs and vectors can be used to in vitro transcribe a gRNA or tagRNA described herein.

[0245] In some embodiments, a nucleic acid encoding a RT editor is administered to the subject. In some embodiments, the nucleic acid can be generated by an in vitro transcription reaction. In some embodiments, generating in vitro transcribed RNA comprises incubating a linear DNA template with an RNA polymerase and a nucleotide mixture under conditions to allow (run-off) RNA in vitro transcription. The nucleotide mixture can be part of an in vitro transcription mix (IVT-mix). In some embodiments, the RNA polymerase is a T7 RNA polymerase.

[0246] The nucleotide mixture used in RNA in vitro transcription can additionally contain modified nucleotides as defined below. In some embodiments, the nucleotide mixture (e.g., the fraction of each nucleotide in the mixture) used for RNA in vitro transcription reactions can be optimized for the given RNA sequence (optimized NTP mix). Such methods are described, for example in WO2015/188933. RNA obtained by a process using an optimized NTP mix is, in some embodiments, characterized by reduced immune stimulatory properties.

[0247] In various embodiments the nucleotide mixture in an in vitro transcription reaction comprises a cap analog. Accordingly, in some embodiments the cap analog is a cap0, cap1, cap2, a modified cap0 or a modified cap1 analog, or a cap1 analog as described below.

[0248] The term “cap analog” or “5′-cap structure” as used herein can refer to the 5′ structure of the RNA, particularly a guanine nucleotide, positioned at the 5′-end of an RNA, e.g., an mRNA. In some embodiments, the 5′-cap structure is connected via a 5′-5′-triphosphate linkage to the RNA. In some embodiments, a “5′-cap structure” or a “cap analogue” is not considered to be a “modified nucleotide” or “chemically modified nucleotides”. 5′-cap structures which may be suitable include cap0 (methylation of the first nucleobase, e.g., m7GpppN), cap1 (additional methylation of the ribose of the adjacent nucleotide of m7GpppN), cap2 (additional methylation of the ribose of the 2nd nucleotide downstream of the m7GpppN), cap3 (additional methylation of the ribose of the 3rd nucleotide downstream of the m7GpppN), cap4 (additional methylation of the ribose of the 4th nucleotide downstream of the m7GpppN), ARCA (anti-reverse cap analogue), modARCA (e.g., phosphothioate modARCA), inosine, N1-methyl-guanosine, 2′-fluoro-guanosine, 7-deaza-guanosine, 8-oxo-guanosine, 2-amino-guanosine, LNA-guanosine, and 2-azido-guanosine.

[0249] A 5′-cap (cap0 or cap1) structure can be formed in chemical RNA synthesis, using capping enzymes, or in RNA in vitro transcription (co-transcriptional capping) using cap analogs. The term “cap analog” as used herein can refer to a non-polymerizable di-nucleotide or tri-nucleotide that has cap functionality in that it facilitates translation or localization, and/or prevents degradation of the RNA when incorporated at the 5′-end of the RNA. Non-polymerizable means that the cap analogue will be incorporated only at the 5′-terminus because it does not have a 5′ triphosphate and therefore cannot be extended in the 3′-direction by a template-dependent polymerase, (e.g., a DNA-dependent RNA polymerase). Examples of cap analogues include m7GpppG, m7GpppA, m7GpppC; unmethylated cap analogues (e.g., GpppG); dimethylated cap analogue (e.g., m2,7GpppG), trimethylated cap analogue (e.g. m2,2,7GpppG), dimethylated symmetrical cap analogues (e.g. m7Gpppm7G), or anti reverse cap analogues (e.g., ARCA; m7,2′OmeGpppG, m7,2′dGpppG, m7,3′OmeGpppG, m7,3′dGpppG and their tetraphosphate derivatives). Further cap analogues have been described previously, e.g., WO2008/016473, WO2008/157688, WO2009/149253, WO2011/015347, and WO2013/059475. Further suitable cap analogues in that context are described in, e.g., WO2017/066793, WO2017/066781, WO2017/066791, WO2017/066789, WO2017/053297, WO2017/066782, WO2018/075827 and WO2017/066797 wherein the disclosures relating to cap analogues are incorporated herewith by reference.

[0250] In some embodiments, a cap1 structure is generated using tri-nucleotide cap analogue as disclosed in WO2017/053297, WO2017/066793, WO2017/066781, WO2017/066791, WO2017/066789, WO2017/066782, WO2018/075827 and WO2017/066797. For example, any cap analog derivable from the structure disclosed in claim 1-5 of WO2017/053297 may be suitably used to co-transcriptionally generate a cap1 structure. In some embodiments, any cap analog derivable from the structure described in WO2018/075827 can be suitably used to co-transcriptionally generate a cap1 structure. In some embodiments, the cap1 analog is a cap1 trinucleotide cap analog. In some embodiments, the cap1 structure of the in vitro transcribed RNA is formed using co-transcriptional capping using tri-nucleotide cap analog m7G(5′)ppp(5′)(2′OMeA)pG or m7G(5′)ppp(5′)(2′OMeG)pG. In some embodiments, the cap1 analog is m7G(5′)ppp(5′)(2′OMeA)pG.

[0251] In some embodiments, the RNA (e.g., mRNA) comprises a 5′-cap structure, e.g., a cap1 structure. In some embodiments, the 5′ cap structure can improve stability and/or expression of the mRNA. A cap1 structure comprising mRNA (produced by, e.g., in vitro transcription) has several advantageous features including an increased translation efficiency and a reduced stimulation of the innate immune system. In some embodiments, the in vitro transcribed RNA comprises at least one coding sequence encoding at least one peptide or protein. In some embodiments, the protein is an RNA-guided endonuclease. In some embodiments, the RNA-guided endonuclease is Cas9 or a derivative thereof.

[0252] In some embodiments, the mRNA can comprise at least one chemically modified nucleoside and/or nucleotide. In some embodiments, the chemically modified nucleoside and/or nucleotide is selected from pseudouridine, N1-methylpseudouridine, and 5-methoxyuridine. In some embodiments, the chemically modified nucleoside is N1-methylpseudouridine (e.g., 1-methylpseudouridine). In some embodiments, at least about 80% or more (e.g., about 85%, 90%, 91%, 92%, 93%, 94%, 95%, 96%, 97%, 98%, 99%) of uridines in the mRNA are modified or replaced with N1-methylpseudouridine. In some embodiments, 100% of the uridines (e.g., uracils) in the mRNA are modified or replaced with N1-methylpseudouridine. In some embodiments, the disclosure provides an mRNA comprising a nucleotide sequence that is at least 85% or more (e.g., 86%, 87%, 88%, 89%, 90%, 91%, 92%, 93%, 94%, 95%, 96%, 97%, 98%, 99%, 100%) identical to the nucleotide sequence of SEQ ID NO: 13, wherein 100% of the uridines or uracils of the mRNA are modified or replaced with N1-methylpseudouridine. In some embodiments, two or more (e.g., 2, 3, 4, 5, 6, 7, 8, 9, 10, 11, 12, 13, 14, 15, 16, 17, 18, 19, 20, 21, 22, 23, 24, 25, 26, 27, 28, 29, 30, 31, 32, 33, 34, 35, 36, 37, 38, 39, 40, 41, 42, 43, 44, 45, 46, 47, 48, 49, 50, 51, 52, 53, 54, 55, 56, 57, 58, 59, 60, 61, 62, 63, 64, 65, 66, 67, 68, 69, 70, 71, 72, 73, 74, 75, 76, 77, 78, 79, 80, 81, 82, 83, 84, 85, 86, 87, 88, 89, 90, 91, 92, 93, 94, 95, 96, 97, 98, 99, 100, 200, 300, 400, 500, 600, 700, 800 or more) of the uridine or uracil residues are N1-methylpseudouridine.

[0253] In some embodiments, the disclosure provides an mRNA comprising a nucleotide sequence that is 100% identical to the nucleotide sequence of SEQ ID NO: 57 or 58, wherein 100% of the uridines (e.g., uracils) of the mRNA are modified or replaced with N1-methylpseudouridine. Optimized mRNAs encoding, for example Cas9, are also described in US20210355463A1, which is hereby incorporated by reference in its entirety.

### Compositions and Therapeutic Applications

[0254] Provided herein also includes compositions. A composition can include one or more gRNA(s) (e.g., tagRNA and egRNA), and a RT editor protein described herein. A composition can include one or more gRNA(s) (e.g., tagRNA and egRNA), and a nucleic acid encoding a RT editor protein described herein. The compositions can include one or more of the RT editing complexes of the disclosure. Also provided herein are ribonucleoprotein (RNP) complexes comprising any of the RT editing complexes disclosed herein, or a component thereof. In some embodiments, the RNP comprises, e.g., a RT editor (e.g., a polypeptide or a polynucleotide encoding a RT editor) and a tagRNA. In some embodiments, the RNP comprises, e.g., a RT editor (e.g., a polypeptide or a polynucleotide encoding a RT editor) and an egRNA. In some embodiments, the RNP comprises, e.g., a RT editor (e.g., a polypeptide or a polynucleotide encoding a RT editor) and both a tagRNA and an egRNA.

[0255] Disclosed herein include lipid nanoparticles (LNPs). In some embodiments, the LNP comprises any of the RT editing systems disclosed herein, or a component thereof. The LNP can comprise the tagRNA and the nucleic acid encoding the RT editor. The nucleic acid encoding the RT editor can be mRNA. The LNP can comprise the egRNA. The lipid nanoparticle can comprise one or more neutral lipids, charged lipids, ionizable lipids, steroids, and polymers conjugated lipids. The lipid nanoparticle can comprise cholesterol, a polyethylene glycol (PEG) lipid, or both.

[0256] In some embodiments, the composition can comprise one or more gRNA(s) (e.g., tagRNA and/or egRNA) each comprising a spacer complementary to a genomic sequence within or near (for example, within any of 1, 2, 3, 4, 5, 6, 7, 8, 9, 10, 15, 20, 25, 30, 35, 40, 45, 50, 55, 60, 65, 70, 75, 80, 85, 90, 95, 100 or more bases from) any exon of the ATPB7 gene. In some embodiments, the gRNA targets a sequence within exon 14 of the ATPB7 gene. The gRNA can comprise a spacer sequence complementary or identical to a target sequence within exon 14 of the ATPB7 gene. In some embodiments, a gRNA comprises a spacer sequence of any one of SEQ ID NOs: 50-52 and 133-136 or a variant thereof have one, two or three mismatches relative to any one of SEQ ID NOs: 50-52 and 133-136. In some embodiments, the gRNA comprises a spacer comprising or consisting of the sequence of SEQ ID NOs: 50-52 and 133-136.

[0257] In some embodiments, the RT editor comprises a DNA-binding domain of a Cas12a, Cas12b, Cas12c, Cas12d, Cas12e, Cas14a, Cas14b, Cas14c, Cas14d, Cas14e, Cas14f, Cas14g, Cas14h, Cas14u, Casϕendonuclease, Ssch1Cas9, Sro1Cas9, Sha4Cas9, SsuCas9, iSpyMacCas9, Ssi5Cas9, Ssi8Cas9, Ssci4Cas9, Shy1Cas9, Sag3Cas9, Slutr1Cas9, Ssch3Cas9, SpRYCas9, SpRYcCas9, Sma2Cas9, SsaCas9, EvoCjCas9, or iSpyMac or a functional derivative thereof. In some embodiments, the DNA endonuclease domain is Cas9. In some embodiments, the Cas9 is from Streptococcus pyogenes (SPYCas9). In some embodiments, the Cas9 is from Staphylococcus lugdunensis (SluCas9). In some embodiments, a DNA sequence that is transcribed to the nucleic acid encoding the RT editor is codon optimized. In some embodiments, the nucleic acid encoding the RT editor (e.g., an mRNA) comprises a 5′ CAP structure and 3′ polyA tail. In some embodiments, the nucleic acid encoding the DNA endonuclease is linked to the gRNA via a covalent bond.

[0258] In some embodiments, each of the components of a RT editing system can be separately formulated into lipid nanoparticles, or are all co-formulated into one lipid nanoparticle.

[0259] In some embodiments, RT editor mRNA can be formulated in a lipid nanoparticle, while gRNAs (e.g., tagRNA and/or egRNA) can be delivered in an AAV vector.

[0260] Options are available to deliver the RT editor as a DNA plasmid, as mRNA or as a protein. A guide RNA (e.g., tagRNA and/or egRNA) can be expressed from the same DNA, or can also be delivered as an RNA. The RNA can be chemically modified to alter or improve its half-life, or decrease the likelihood or degree of immune response. The endonuclease protein can be complexed with the gRNA prior to delivery. In some embodiments, the plasmid comprises or consists of the sequence of SEQ ID NO: 56 or a sequence having at least about 85% identity (e.g., 85%, 86%, 87%, 88%, 89%, 90%, 91%, 92%, 93%, 94%, 95%, 96%, 97%, 98%, 99%, 100%, or a number or a range between any two of these values) to the sequence of SEQ ID NO: 56.

[0261] Disclosed herein include isolated cells. In some embodiments, the isolated cell comprises any of the tagRNAs, the RT editing systems, the RT editing complexes, the RNPs, the LNPs, or the vectors provided herein. The cell can be a mammalian cell. In some embodiments, the cell can be a human cell. The cell can be a primary cell. The cell can be a hepatocyte. In some embodiments, the cell has or is suspected of having a mutation that can be corrected via gene editing. In some embodiments, the gene editing system is an RT editing system. The cell can be from a subject having Wilson's disease. The cell can be from a subject having A1ATD disease or disorder. The cell can be from a subject having phenylketonuria or hyperphenylalaninemia. The subject can be a human.

[0262] Disclosed herein include compositions. In some embodiments, the composition is a pharmaceutical composition. In some embodiments, the pharmaceutical composition comprises: any of the tagRNAs, the RT editing systems, the RT editing complexes, the RNPs, the LNPs, the polynucleotides, the vectors, or the cells disclosed herein; and (ii) a pharmaceutically acceptable carrier.

[0263] A composition described above can further have one or more additional reagents, where such additional reagents are selected from a buffer, a buffer for introducing a polypeptide or polynucleotide into a cell, a wash buffer, a control reagent, a control vector, a control RNA polynucleotide, a reagent for in vitro production of the polypeptide from DNA, adaptors for sequencing and the like. A buffer can be a stabilization buffer, a reconstituting buffer, a diluting buffer, or the like. In some embodiments, a composition can also include one or more components that can be used to facilitate or enhance the on-target binding or the cleavage of DNA by the endonuclease, or improve the specificity of targeting.

[0264] One or more components of a composition can be formulated with pharmaceutically acceptable excipients such as carriers, solvents, stabilizers, adjuvants, diluents, etc., depending upon the particular mode of administration and dosage form. In some embodiments, guide RNA compositions are generally formulated to achieve a physiologically compatible pH, and range from a pH of about 3 to a pH of about 11, about pH 3 to about pH 7, depending on the formulation and route of administration. In some embodiments, the pH is adjusted to a range from about pH 5 to about pH 8.

[0265] Suitable excipients can include, for example, carrier molecules that include large, slowly metabolized macromolecules such as proteins, polysaccharides, polylactic acids, polyglycolic acids, polymeric amino acids, amino acid copolymers, and inactive virus particles. Other exemplary excipients include antioxidants (for example and without limitation, ascorbic acid), chelating agents (for example and without limitation, EDTA), carbohydrates (for example and without limitation, dextrin, hydroxyalkylcellulose, and hydroxyalkylmethylcellulose), stearic acid, liquids (for example and without limitation, oils, water, saline, glycerol and ethanol), wetting or emulsifying agents, pH buffering substances, and the like.

[0266] Physiologically tolerable carriers are well known in the art. Exemplary liquid carriers are sterile aqueous solutions that contain no materials in addition to the active ingredients and water, or contain a buffer such as sodium phosphate at physiological pH value, physiological saline or both, such as phosphate-buffered saline. Aqueous carriers can contain more than one buffer salt, as well as salts such as sodium and potassium chlorides, dextrose, polyethylene glycol and other solutes. Liquid compositions can also contain liquid phases in addition to and to the exclusion of water. Exemplary of such additional liquid phases are glycerin, vegetable oils such as cottonseed oil, and water-oil emulsions. The amount of an active compound used in the cell compositions that is effective in the treatment of a particular disorder or condition will depend on the nature of the disorder or condition, and can be determined by standard clinical techniques.

[0267] The terms “stable” or “stability” as used herein can refer to the ability of the compounds herein described (e.g., the RT editor or a nucleic acid encoding the RT editor and/or gRNA (e.g., tagRNA and/or egRNA)) to maintain therapeutic efficacy (e.g., all or the majority of its intended biological activity and/or physiochemical integrity) over extended periods of time. The stability of one or more of the compounds described herein (e.g., the RT editor or a nucleic acid encoding the RT editor and/or gRNA (e.g., tagRNA and/or egRNA)) can be 2 weeks, 15 days, 16 days, 17 days, 18 days, 19 days, 20 days, 3 weeks, 22 days, 23 days, 24 days, 25 days, 26 days, 27 days, 28 days, 29 days, 30 days, 31 days, 1 month, 2 months, 3 months, 4 months, 5 months, 6 months, 7 months, 8 months, 9 months, 10 months, 11 months, 1 year, 13 months, 14 months, 15 months, 16 months, 17 months, 18 months, 19 months, 20 months, 21 months, 22 months, 23 months, 2 years, 3 years, or more than 3 years. The temperature of storage can vary. For example, the storage temperature can be, can be about, can be at least, or can be at least about −80° C., −65° C., −20° C., 5° C., or a number or range between any two of these values. In some embodiments, the storage temperature is less than or equal to −65° C.

[0268] In some embodiments, the compounds herein described (e.g., the RT editor or a nucleic acid encoding the RT editor and/or gRNA (e.g., tagRNA and/or egRNA)) of a composition can be delivered via transfection such as calcium phosphate transfection, DEAE-dextran mediated transfection, cationic lipid-mediated transfection, electroporation, electrical nuclear transport, chemical transduction, electrotransduction, Lipofectamine-mediated transfection, Effectene-mediated transfection, lipid nanoparticle (LNP)-mediated transfection, or any combination thereof. In some embodiments, the composition is introduced to the cells via lipid-mediated transfection using a lipid nanoparticle.

[0269] Disclosed herein include methods for editing an target gene. In some embodiments, the method comprises contacting the target gene with (i) any of the tagRNAs of the disclosure and a RT editor comprising a DNA binding domain, a DNA endonuclease domain and a DNA polymerase domain or (ii) any of the RT editing systems disclosed herein. In some embodiments, the tagRNA directs the RT editor to incorporate the intended nucleotide edit in the target gene, thereby editing the target gene.

[0270] Disclosed herein include methods for editing a target gene. In some embodiments, the method comprises contacting the target gene with any of the RT editing complexes disclosed herein, wherein the tagRNA directs the RT editor to incorporate the intended nucleotide edit in the ATP7B gene, thereby editing the target gene.

[0271] In some embodiments, the RT editor synthesizes a single stranded DNA encoded by the editing template, wherein the single stranded DNA replaces the editing target sequence and results in incorporation of the intended nucleotide edit into a region corresponding to the editing target in the target gene. The target gene can be in a cell. The cell can be a mammalian cell. The cell can be a human cell. The cell can be a primary cell. The cell can be a hepatocyte. The cell can be in a subject. The subject can be a human. In some embodiments, the cell has or is suspected of having a mutation that can be corrected via gene editing. In some embodiments, the gene editing system is an RT editing system. The cell can be from a subject having a disease or disorder. The cell can be from a subject having Wilson's disease. The cell can be from a subject having A1ATD disease or disorder. The cell can be from a subject having phenylketonuria or hyperphenylalaninemia. The method can comprise administering the cell to the subject after incorporation of the intended nucleotide edit. Also provided herein are cells generated by any of the methods disclosed herein. Disclosed herein include populations of cells generated by any of the methods of the disclosure.

[0272] Disclosed herein include methods for treating a disease or disorder in a subject in need thereof via gene editing. In some embodiments, the gene editing system is an RT editing system. Disclosed herein include methods for treating Wilson's disease in a subject in need thereof. Disclosed herein include methods for treating A1ATD disease in a subject in need thereof. Disclosed herein include methods for treating phenylketonuria or hyperphenylalaninemia in a subject in need thereof. In some embodiments, the method comprises administering to the subject (i) any of the tagRNAs of the disclosure and a RT editor comprising a DNA binding domain, a DNA endonuclease domain and a DNA polymerase domain or (ii) any of the RT editing systems disclosed herein. In some embodiments, the tagRNA directs the RT editor to incorporate the intended nucleotide edit in the mutated gene in the subject, thereby treating the disease or disorder in the subject. In some embodiments, the tagRNA directs the RT editor to incorporate the intended nucleotide edit in the ATP7B gene in the subject, thereby treating Wilson's disease in the subject. In some embodiments, the tagRNA directs the RT editor to incorporate the intended nucleotide edit in the SERPINA1 gene in the subject, thereby treating A1ATD disease or disorder in the subject. In some embodiments, the tagRNA directs the RT editor to incorporate the intended nucleotide edit in the PAH gene in the subject, thereby treating phenylketonuria or hyperphenylalaninemia in the subject.

[0273] Disclosed herein include methods for treating a disease in a subject in need thereof. In some embodiments, the method comprises administering to the subject any of the RT editing complexes, any of the RNPs, any of the LNPs, or any of the pharmaceutical compositions disclosed herein. In some embodiments, the tagRNA directs the RT editor to incorporate the intended nucleotide edit in the target gene in the subject, thereby treating the disease or disorder in the subject. The subject can be a human.

[0274] In some embodiments, editing efficiency of the RT editing compositions and methods described herein can be measured by calculating the percentage of edited target genes in a population of cells introduced with the RT editing composition. In some embodiments, the editing efficiency is determined after 1 hour, 2 hours, 6 hours, 12 hours, 24 hours, 36 hours, 48 hours, 3 days, 4 days, 5 days, 7 days, 10 days, or 14 days of exposing a target gene (e.g., ATP7B gene, PAH gene, or SERPINA1 gene within the genome of a cell) to a RT editing composition (e.g., LNP). In some embodiments, the population of cells introduced with the RT editing composition is ex vivo. In some embodiments, the population of cells introduced with the RT editing composition is in vitro. In some embodiments, the population of cells introduced with the RT editing composition is in vivo. In some embodiments, the RT editing methods disclosed herein have an editing efficiency of at least about 1%, at least about 5%, at least about 10%, at least about 20%, at least about 30%, at least about 40%, at least about 50%, at least about 60%, at least about 70%, at least about 80%, at least about 90%, at least about 95%, or at least about 99% relative to a suitable control.

[0275] In some embodiments, the RT editing compositions provided herein are capable of incorporated one or more intended nucleotide edits without generating a significant proportion of indels. The term “indel(s)”, as used herein, refers to the insertion or deletion of a nucleotide base within a polynucleotide, for example, a target gene. Such insertions or deletions can lead to frame shift mutations within a coding region of a gene. Indel frequency of editing can be calculated by methods known in the art. In some embodiments, the methods disclosed herein can have an indel frequency of less than 20%, less than 10%, less than 9%, less than 8%, less than 7%, less than 6%, less than 5%, less than 4%, less than 3%, less than 2%, less than 1.5%, or less than 1%. In some embodiments, any number of indels is determined after at least 1 hour, at least 2 hours, at least 6 hours, at least 12 hours, at least 24 hours, at least 36 hours, at least 48 hours, at least 3 days, at least 4 days, at least 5 days, at least 7 days, at least 10 days, or at least 14 days of exposing a target gene (e.g., ATP7B gene, PAH gene, or SERPINA1 gene within the genome of a cell) to a RT editing composition.

[0276] In some embodiments, the RT editing methods disclosed hereto have an editing efficiency of at least about 95% and an indel frequency of less than 1% to a target cell, e.g., a human primary cell or hepatocyte, to some embodiments, the RT editing methods disclosed hereto have an editing efficiency of at least about 95% and an indel frequency of less than 0.5% to a target cell, e.g., a human primary cell or hepatocyte, to some embodiments, the RT editing methods disclosed hereto have an editing efficiency of at least about 95% and an indel frequency of less than 0.1% to a target cell, e.g., a human primary cell or hepatocyte, to some embodiments, any number of indels is determined after at least 1 hour, at least 2 hours, at least 6 hours, at least 12 hours, at least 24 hours, at least 36 hours, at least 48 hours, at least 3 days, at least 4 days, at least 5 days, at least 7 days, at least 10 days, or at least 14 days of exposing a target gene (e.g., ATP7B gene, PAH gene, or SERPINA1 gene within the genome of a cell) to a RT editing composition, to some embodiments, the editing efficiency is determined after 1 hour, 2 hours, 6 hours, 12 hours, 24 hours, 36 hours, 48 hours, 3 days, 4 days, 5 days, 7 days, 10 days, or 14 days of exposing a target gene (e.g., a ATP7B gene, PAH gene, or SERPINA1 gene within the genome of a cell) to a RT editing composition.

[0277] In some embodiments, the target tissue for the compositions and methods described herein is liver tissue. In some embodiments, the target cells for the compositions and methods described herein is hepatocyte.

[0278] In some embodiments, the pharmaceutical composition thereof can be administered by aerosol delivery, nasal delivery, vaginal delivery, rectal delivery, buccal delivery, ocular delivery, local delivery, topical delivery, intracisternal delivery, intraperitoneal delivery, oral delivery, intramuscular injection, intravenous injection, subcutaneous injection, intranodal injection, intratumoral injection, intraperitoneal injection, and/or intradermal injection, or any combination thereof. The administration can be local or systemic. The systemic administration includes enteral and parenteral administration. In some embodiments, more than one administration can be employed to achieve the desired level of gene expression over a period of various intervals, e.g., daily, weekly, monthly, or yearly.

[0279] The pharmaceutical composition thereof can be administered to a subject in need thereof at a pharmaceutically effective amount. The term “pharmaceutically effective amount” as used herein means that the amount of the pharmaceutical composition that will elicit a desired therapeutic effect and/or biological or medical responses of a tissue, system, animal or human. The administration can result in a desired correction in target gene such restoration of wild-type activity of the protein.

[0280] In certain embodiments, disease models for screening of the RT editing system and guide RNAs are used to demonstrate efficacy and tolerability. In some embodiments, efficacy and tolerability are demonstrated in vitro. In some embodiments, efficacy and tolerability are demonstrated in vivo. In some embodiments, the in vitro system is a cell line. In certain embodiments, the cell line is a human hepatocyte cell line, for instance, Huh7 cell line wherein the specific disease mutation has been incorporated. In certain embodiments, the in vitro cell line are primary hepatocytes, for instance primary murine hepatocytes and primary human hepatocytes. In certain embodiments, the in vivo system are humanized mouse and rat models, wherein the specific disease mutation has been incorporated. Such disease models are well established in literature wherein the data may be extrapolated to efficacy and tolerability in humans.

### EXAMPLES

[0281] Some aspects of the embodiments discussed above are disclosed in further detail in the following examples, which are not in any way intended to limit the scope of the present disclosure.

### Example 1

### Methods and Compositions for Gene Editing

[0282] Provided in this Example are methods and compositions related to the RT editing systems of the disclosure. Also provided are methods and compositions of editing of ATP7B for treating Wilson's disease. Disclosed herein are methods of correction of the disease mutation using Reverse Transcriptase (RT) editing. Also provided in this Example are studies of systems for gRNA-based targeting and gRNA-based introduction of nucleotide edit(s) of interest, such as the impact of including, excluding, and/or modifying components of such systems, including, for example, the gRNA segment that binds a nicked target site, the gRNA segment that is reverse transcribed, the subsequent gRNA segment having target homology, and a second gRNA that nicks an opposite strand as said gRNA. The components of an RT editing system include: mRNA encoding the editor (e.g., nicking Cas9 fused to reverse transcriptase); long guide RNA encoding the edit (e.g., tagRNA in RT editing); and an optional second guide RNA (e.g., egRNA) to increase editing efficiency. In some embodiments, the components can be formulated in LNP for therapeutic delivery.

[0283] Cell lines (HEK293T and Huh7 cell lines) were engineered to contain the disease mutation, then used as models for mutation correction experiments. NGG spacer1 (SEQ ID NO: 50) and NGG spacer2 (SEQ ID NO: 133) are options for the long gRNA (FIG. 1). As shown in FIG. 1, egRNA1 (SEQ ID NO: 51), egRNA2 (SEQ ID NO: 52), and egRNA3 (SEQ ID NO: 134) are options for the second gRNA (e.g., egRNA).

[0284] FIG. 2 displays data of editing efficiency in HEK293T cells. In this experiment, the editing system components were delivered by plasmid transfection, and the flap binding sequence (FB sequence; FBS) was 13 nucleotides in length. Experiments using only the long gRNA (e.g., tagRNA) or with a second, egRNA were performed.

[0285] Shown in FIG. 3A-FIG. 4C are data from experiments using mRNA (encoding the RT editor) and synthetic gRNAs. For NGG2 tagRNAs, maximum 15% correction with tagRNA+egRNA system was observed. With regards to surrogate mutations, the following was determined: correction is +7 T>G; surrogate in WT genome was +7 G>A (maximum 5% editing); and surrogate in H1069Q genome was +7 T>A (maximum 6.4% editing). In some embodiments, typically, systems employing only the tagRNA were better than using both a tagRNA and egRNA. In some embodiments, model systems are employed that have a wildtype human genome, and there is no disease mutation. In some such embodiments, a user cannot make the correction mutation, but a user can make a different nearby mutation instead (termed a surrogate mutation). In some embodiments a similar strategy/surrogate mutation (correction) can be used to evaluate toxicity in NEPs.

[0286] FIG. 5 displays results from a screen of spacer sequences for editing ATP7B3 gene performed in BTEK293T and Huh7 cells. Cas9 mRNA plus synthetic gRNA were provided in these experiments.

[0287] Table 15 (Huh7 cells) and Table 16 (HEK293T cells) below display editing efficiencies for the RT editing gRNAs of the disclosure (e.g., tagRNA alone or with a second, egRNA). The editing efficiency shown in the tables are the average of 3 independent experiments.

TABLE 15
EDITING EFFICIENCY IN Huh7 CELLS

| tagRNA | SEQ | egRNA | SEQ | Editing |
|---|---|---|---|---|
| Name | ID NO: | Name | ID NO: | (%) |
| BK g050 | 99 | N/A | N/A | 1.8 |
| BK g051 | 100 | N/A | N/A | 2.5 |
| BK g052 | 101 | N/A | N/A | 3.2 |
| BK g053 | 102 | N/A | N/A | 4.4 |
| BK g054 | 103 | N/A | N/A | 8.2 |
| BK g055 | 104 | N/A | N/A | 16.7 |
| BK g056 | 105 | N/A | N/A | 8.8 |
| BK g057 | 106 | N/A | N/A | 0.1 |
| BK g058 | 107 | N/A | N/A | 5.7 |
| BK g059 | 108 | N/A | N/A | 8.0 |
| BK g060 | 109 | N/A | N/A | 13.3 |
| BK g061 | 110 | N/A | N/A | 9.7 |
| BK g062 | 111 | N/A | N/A | 12.0 |
| BK g063 | 112 | N/A | N/A | 19.3 |
| BK g064 | 113 | N/A | N/A | 13.0 |
| BK g065 | 114 | N/A | N/A | 0.2 |
| BK g066 | 115 | N/A | N/A | 11.0 |
| BK g067 | 116 | N/A | N/A | 14.5 |
| BK g068 | 117 | N/A | N/A | 15.2 |
| BK g069 | 118 | N/A | N/A | 18.3 |
| BK g070 | 119 | N/A | N/A | 20.2 |
| BK g071 | 120 | N/A | N/A | 22.6 |
| BK g072 | 121 | N/A | N/A | 3.9 |
| BK g073 | 122 | N/A | N/A | 0.4 |
| BK g074 | 123 | N/A | N/A | 6.2 |
| BK g075 | 124 | N/A | N/A | 10.0 |
| BK g076 | 125 | N/A | N/A | 9.6 |
| BK g077 | 126 | N/A | N/A | 11.6 |
| BK g078 | 127 | N/A | N/A | 9.3 |
| BK g079 | 128 | N/A | N/A | 10.7 |
| BK g080 | 129 | N/A | N/A | 12.3 |
| BK g081 | 130 | N/A | N/A | 0.5 |
| BK g050 | 99 | BK g040 | 131 | 24.4 |
| BK g051 | 100 | BK g040 | 131 | 28.3 |
| BK g052 | 101 | BK g040 | 131 | 35.6 |
| BK g053 | 102 | BK g040 | 131 | 39.3 |
| BK g054 | 103 | BK g040 | 131 | 51.0 |
| BK g055 | 104 | BK g040 | 131 | 55.7 |
| BK g056 | 105 | BK g040 | 131 | 50.1 |
| BK g057 | 106 | BK g040 | 131 | 1.2 |
| BK g058 | 107 | BK g040 | 131 | 39.8 |
| BK g059 | 108 | BK g040 | 131 | 46.4 |
| BK g060 | 109 | BK g040 | 131 | 50.8 |
| BK g061 | 110 | BK g040 | 131 | 41.6 |
| BK g062 | 111 | BK g040 | 131 | 34.5 |
| BK g063 | 112 | BK g040 | 131 | 52.5 |
| BK g064 | 113 | BK g040 | 131 | 55.9 |
| BK g065 | 114 | BK g040 | 131 | 1.7 |
| BK g066 | 115 | BK g040 | 131 | 41.8 |
| BK g067 | 116 | BK g040 | 131 | 52.2 |
| BK g068 | 117 | BK g040 | 131 | 55.8 |
| BK g069 | 118 | BK g040 | 131 | 57.0 |
| BK g070 | 119 | BK g040 | 131 | 61.0 |
| BK g071 | 120 | BK g040 | 131 | 67.9 |
| BK g072 | 121 | BK g040 | 131 | 12.5 |
| BK g073 | 122 | BK g040 | 131 | 3.0 |
| BK g074 | 123 | BK g040 | 131 | 32.8 |
| BK g075 | 124 | BK g040 | 131 | 38.6 |
| BK g076 | 125 | BK g040 | 131 | 37.7 |
| BK g077 | 126 | BK g040 | 131 | 36.6 |
| BK g078 | 127 | BK g040 | 131 | 36.9 |
| BK g079 | 128 | BK g040 | 131 | 39.8 |
| BK g080 | 129 | BK g040 | 131 | 38.6 |
| BK g081 | 130 | BK g040 | 131 | 4.2 |
| BK g050 | 99 | BK g041 | 132 | 11.1 |
| BK g051 | 100 | BK g041 | 132 | 19.3 |
| BK g052 | 101 | BK g041 | 132 | 23.6 |
| BK g053 | 102 | BK g041 | 132 | 28.7 |
| BK g054 | 103 | BK g041 | 132 | 34.2 |
| BK g055 | 104 | BK g041 | 132 | 43.2 |
| BK g056 | 105 | BK g041 | 132 | 39.6 |
| BK g057 | 106 | BK g041 | 132 | 0.9 |
| BK g058 | 107 | BK g041 | 132 | 31.3 |
| BK g059 | 108 | BK g041 | 132 | 39.9 |
| BK g060 | 109 | BK g041 | 132 | 39.5 |
| BK g061 | 110 | BK g041 | 132 | 28.3 |
| BK g062 | 111 | BK g041 | 132 | 27.4 |
| BK g063 | 112 | BK g041 | 132 | 40.6 |
| BK g064 | 113 | BK g041 | 132 | 48.1 |
| BK g065 | 114 | BK g041 | 132 | 1.4 |
| BK g066 | 115 | BK g041 | 132 | 41.2 |
| BK g067 | 116 | BK g041 | 132 | 47.0 |
| BK g068 | 117 | BK g041 | 132 | 51.0 |
| BK g069 | 118 | BK g041 | 132 | 56.3 |
| BK g070 | 119 | BK g041 | 132 | 56.6 |
| BK g071 | 120 | BK g041 | 132 | 60.9 |
| BK g072 | 121 | BK g041 | 132 | 11.1 |
| BK g073 | 122 | BK g041 | 132 | 1.9 |
| BK g074 | 123 | BK g041 | 132 | 27.6 |
| BK g075 | 124 | BK g041 | 132 | 34.2 |
| BK g076 | 125 | BK g041 | 132 | 27.2 |
| BK g077 | 126 | BK g041 | 132 | 31.8 |
| BK g078 | 127 | BK g041 | 132 | 38.4 |
| BK g079 | 128 | BK g041 | 132 | 34.4 |
| BK g080 | 129 | BK g041 | 132 | 38.8 |
| BK g081 | 130 | BK g041 | 132 | 3.0 |

TABLE 16
EDITING EFFICIENCY IN HEK293T

| tagRNA | SEQ | egRNA | SEQ | Editing |
|---|---|---|---|---|
| Name | ID NO: | Name | ID NO: | (%) |
| BK g050 | 99 | N/A | N/A | 4.3 |
| BK g051 | 100 | N/A | N/A | 4.5 |
| BK g052 | 101 | N/A | N/A | 6.0 |
| BK g053 | 102 | N/A | N/A | 6.9 |
| BK g054 | 103 | N/A | N/A | 11.3 |
| BK g055 | 104 | N/A | N/A | 22.0 |
| BK g056 | 105 | N/A | N/A | 8.6 |
| BK g057 | 106 | N/A | N/A | 0.2 |
| BK g058 | 107 | N/A | N/A | 8.8 |
| BK g059 | 108 | N/A | N/A | 12.8 |
| BK g060 | 109 | N/A | N/A | 20.8 |
| BK g061 | 110 | N/A | N/A | 25.4 |
| BK g062 | 111 | N/A | N/A | 25.3 |
| BK g063 | 112 | N/A | N/A | 28.3 |
| BK g064 | 113 | N/A | N/A | 15.3 |
| BK g065 | 114 | N/A | N/A | 9.2 |
| BK g066 | 115 | N/A | N/A | 16.5 |
| BK g067 | 116 | N/A | N/A | 20.0 |
| BK g068 | 117 | N/A | N/A | 21.4 |
| BK g069 | 118 | N/A | N/A | 25.0 |
| BK g070 | 119 | N/A | N/A | 26.4 |
| BK g071 | 120 | N/A | N/A | 29.8 |
| BK g072 | 121 | N/A | N/A | 4.4 |
| BK g073 | 122 | N/A | N/A | 0.585 |
| BK g074 | 123 | N/A | N/A | 14.3 |
| BK g075 | 124 | N/A | N/A | 15.5 |
| BK g076 | 125 | N/A | N/A | 15.6 |
| BK g077 | 126 | N/A | N/A | 19.6 |
| BK g078 | 127 | N/A | N/A | 18.7 |
| BK g079 | 128 | N/A | N/A | 16.7 |
| BK g080 | 129 | N/A | N/A | 20.3 |
| BK g081 | 130 | N/A | N/A | 1.2 |
| BK g050 | 99 | BK g040 | 131 | 7.6 |
| BK g051 | 100 | BK g040 | 131 | 10.5 |
| BK g052 | 101 | BK g040 | 131 | 16.1 |
| BK g053 | 102 | BK g040 | 131 | 11.9 |
| BK g054 | 103 | BK g040 | 131 | 37.5 |
| BK g055 | 104 | BK g040 | 131 | 53.9 |
| BK g056 | 105 | BK g040 | 131 | 37.9 |
| BK g057 | 106 | BK g040 | 131 | 0.6 |
| BK g058 | 107 | BK g040 | 131 | 16.8 |
| BK g059 | 108 | BK g040 | 131 | 28.3 |
| BK g060 | 109 | BK g040 | 131 | 45.3 |
| BK g061 | 110 | BK g040 | 131 | 51.4 |
| BK g062 | 111 | BK g040 | 131 | 54.4 |
| BK g063 | 112 | BK g040 | 131 | 56.9 |
| BK g064 | 113 | BK g040 | 131 | 48.9 |
| BK g065 | 114 | BK g040 | 131 | 1.1 |
| BK g066 | 115 | BK g040 | 131 | 31.1 |
| BK g067 | 116 | BK g040 | 131 | 44.2 |
| BK g068 | 117 | BK g040 | 131 | 51.6 |
| BK g069 | 118 | BK g040 | 131 | 58.1 |
| BK g070 | 119 | BK g040 | 131 | 58.9 |
| BK g071 | 120 | BK g040 | 131 | 59.6 |
| BK g072 | 121 | BK g040 | 131 | 11.1 |
| BK g073 | 122 | BK g040 | 131 | 2.1 |
| BK g074 | 123 | BK g040 | 131 | 18.2 |
| BK g075 | 124 | BK g040 | 131 | 18.2 |
| BK g076 | 125 | BK g040 | 131 | 32.5 |
| BK g077 | 126 | BK g040 | 131 | 35.5 |
| BK g078 | 127 | BK g040 | 131 | 41.0 |
| BK g079 | 128 | BK g040 | 131 | 46.1 |
| BK g080 | 129 | BK g040 | 131 | 47.7 |
| BK g081 | 130 | BK g040 | 131 | 4.2 |
| BK g050 | 99 | BK g041 | 132 | 6.4 |
| BK g051 | 100 | BK g041 | 132 | 13.3 |
| BK g052 | 101 | BK g041 | 132 | 19.5 |
| BK g053 | 102 | BK g041 | 132 | 11.2 |
| BK g054 | 103 | BK g041 | 132 | 31.0 |
| BK g055 | 104 | BK g041 | 132 | 51.2 |
| BK g056 | 105 | BK g041 | 132 | 31.1 |
| BK g057 | 106 | BK g041 | 132 | 0.6 |
| BK g058 | 107 | BK g041 | 132 | 15.7 |
| BK g059 | 108 | BK g041 | 132 | 25.7 |
| BK g060 | 109 | BK g041 | 132 | 51.0 |
| BK g061 | 110 | BK g041 | 132 | 41.9 |
| BK g062 | 111 | BK g041 | 132 | 50.6 |
| BK g063 | 112 | BK g041 | 132 | 54.6 |
| BK g064 | 113 | BK g041 | 132 | 43.4 |
| BK g065 | 114 | BK g041 | 132 | 1.2 |
| BK g066 | 115 | BK g041 | 132 | 27.4 |
| BK g067 | 116 | BK g041 | 132 | 41.5 |
| BK g068 | 117 | BK g041 | 132 | 48.8 |
| BK g069 | 118 | BK g041 | 132 | 46.1 |
| BK g070 | 119 | BK g041 | 132 | 42.8 |
| BK g071 | 120 | BK g041 | 132 | 58.7 |
| BK g072 | 121 | BK g041 | 132 | 14.4 |
| BK g073 | 122 | BK g041 | 132 | 2.5 |
| BK g074 | 123 | BK g041 | 132 | 29.1 |
| BK g075 | 124 | BK g041 | 132 | 28.3 |
| BK g076 | 125 | BK g041 | 132 | 40.6 |
| BK g077 | 126 | BK g041 | 132 | 46.6 |
| BK g078 | 127 | BK g041 | 132 | 49.4 |
| BK g079 | 128 | BK g041 | 132 | 49.3 |
| BK g080 | 129 | BK g041 | 132 | 55.0 |
| BK g081 | 130 | BK g041 | 132 | 4.3 |

### Editing in HEK293T Disease Cell Line Using Transfection of Plasmid DNA

[0288] HEK293T cell lines were engineered to contain the R408W disease mutation in the PAH gene, then used as models for mutation correction experiments. Furthermore, primary human hepatocytes were also used as model cells to install a surrogate mutation.

[0289] 20,000 HEK293T cells carrying the R408W mutation were transfected using MessengerMax with an mRNA encoding RT Editor, a chemically synthesized tagRNA, and in some embodiments a chemically synthesized second guide RNA (egRNA). Specifically, 125 ng of mRNA, 1 pmol tagRNA and 0.3 pmol of egRNA (where applicable) were diluted to 10 μl and mixed with 30 μl Opti-MEM containing 0.5 μl MessengerMax. The lipoplexes were mixed with the cells in suspension and plated into 96-well plates. After transfection, cells were grown at 37° C., 500 CO2 in DMEM media supplemented with 10% serum for 3 days prior to cell lysis and genomic DNA extraction with QuickExtract solution. Editing of the PAH target locus was assessed using amplicon sequencing using primers flanking the PAH gene.

[0290] Table 17 shows the editing efficiency (average of 2 independent experiments and indel percentages.

TABLE 17
EDITING AND INDEL EFFICIENCY IN HEK293T CELLS

| | SEQ | Editing | indel |
|---|---|---|---|
| tagRNA1 Name | ID NO: | (%) | % |
| hPAH_NGG1_F15E6_TtoC | 409 | 0.7 | 0.3 |
| hPAH_NGG1_F14E6_TtoC | 410 | 1.6 | 0.2 |
| hPAH_NGG1_F13E6_TtoC | 411 | 2.7 | 0.3 |
| hPAH_NGG1_F12E6_TtoC | 412 | 3.9 | 0.3 |
| hPAH_NGG1_F11E6_TtoC | 413 | 4.3 | 0.3 |
| hPAH_NGG1_F10E6_TtoC | 414 | 2.1 | 0.3 |
| hPAH_NGG1_F9E6_TtoC | 415 | 2.0 | 0.3 |
| hPAH_NGG1_F8E6_TtoC | 416 | 0.3 | 0.3 |
| hPAH_NGG1_F7E6_TtoC | 417 | 1.4 | 0.2 |
| hPAH_NGG1_F15E8_TtoC | 418 | 0.1 | 0.3 |
| hPAH_NGG1_F14E8_TtoC | 419 | 0.2 | 0.2 |
| hPAH_NGG1_F13E8_TtoC | 420 | 0.1 | 0.3 |
| hPAH_NGG1_F12E8_TtoC | 421 | 0.4 | 0.3 |
| hPAH_NGG1_F11E8_TtoC | 422 | 0.6 | 0.2 |
| hPAH_NGG1_F10E8_TtoC | 423 | 0.7 | 0.2 |
| hPAH_NGG1_F9E8_TtoC | 424 | 0.6 | 0.3 |
| hPAH_NGG1_F8E8_TtoC | 425 | 0.8 | 0.4 |
| hPAH_NGG1_F7E8_TtoC | 426 | 1.1 | 0.3 |
| hPAH_NGG1_F15E10_TtoC | 427 | 1.0 | 0.2 |
| hPAH_NGG1_F14E10_TtoC | 428 | 2.0 | 0.2 |
| hPAH_NGG1_F13E10_TtoC | 429 | 2.5 | 0.3 |
| hPAH_NGG1_F12E10_TtoC | 430 | 3.9 | 0.4 |
| hPAH_NGG1_F11E10_TtoC | 431 | 4.8 | 0.3 |
| hPAH_NGG1_F10E10_TtoC | 432 | 5.6 | 0.4 |
| hPAH_NGG1_F9E10_TtoC | 433 | 3.8 | 0.4 |
| hPAH_NGG1_F8E10_TtoC | 434 | 3.8 | 0.4 |
| hPAH_NGG1_F7E10_TtoC | 435 | 4.9 | 0.4 |
| hPAH_NGG1_F14E12_TtoC | 436 | 1.6 | 0.3 |
| hPAH_NGG1_F13E12_TtoC | 437 | 2.3 | 0.3 |
| hPAH_NGG1_F12E12_TtoC | 438 | 3.6 | 0.4 |
| hPAH_NGG1_F11E12_TtoC | 439 | 4.2 | 0.3 |
| hPAH_NGG1_F10E12_TtoC | 440 | 5.7 | 0.3 |
| hPAH_NGG1_F9E12_TtoC | 441 | 4.8 | 0.4 |
| hPAH_NGG1_F8E12_TtoC | 442 | 4.2 | 0.4 |
| hPAH_NGG1_F7E12_TtoC | 443 | 4.3 | 0.4 |
| hPAH_NGG1_F15E14_TtoC | 444 | 0.04 | 0.3 |
| hPAH_NGG1_F14E14_TtoC | 445 | 0.1 | 0.3 |
| hPAH_NGG1_F13E14_TtoC | 446 | 0.1 | 0.2 |
| hPAH_NGG1_F12E14_TtoC | 447 | 0.2 | 0.3 |
| hPAH_NGG1_F11E14_TtoC | 448 | 0.2 | 0.2 |
| hPAH_NGG1_F10E14_TtoC | 449 | 0.6 | 0.3 |
| hPAH_NGG1_F9E14_TtoC | 450 | 0.8 | 0.4 |
| hPAH_NGG1_F8E14_TtoC | 451 | 1.1 | 0.3 |
| hPAH_NGG1_F7E14_TtoC | 452 | 1.2 | 0.3 |
| hPAH_NGG2_F15E7_AtoG | 453 | 0.4 | 0.2 |
| hPAH_NGG2_F14E7_AtoG | 454 | 0.6 | 0.4 |
| hPAH_NGG2_F13E7_AtoG | 455 | 0.6 | 0.3 |
| hPAH_NGG2_F12E7_AtoG | 456 | 0.8 | 0.4 |
| hPAH_NGG2_F11E7_AtoG | 457 | 0.9 | 0.5 |
| hPAH_NGG2_F10E7_AtoG | 458 | 0.7 | 0.5 |
| hPAH_NGG2_F9E7_AtoG | 459 | 0.6 | 0.6 |
| hPAH_NGG2_F8E7_AtoG | 460 | 0.2 | 0.4 |
| hPAH_NGG2_F7E7_AtoG | 461 | 0.1 | 0.4 |
| hPAH_NGG2_F15E9_AtoG | 462 | 1.4 | 0.3 |
| hPAH_NGG2_F14E9_AtoG | 463 | 2.1 | 0.4 |
| hPAH_NGG2_F13E9_AtoG | 464 | 3.0 | 0.3 |
| hPAH_NGG2_F12E9_AtoG | 465 | 3.9 | 0.5 |
| hPAH_NGG2_F11E9_AtoG | 466 | 4.4 | 0.5 |
| hPAH_NGG2_F10E9_AtoG | 467 | 2.5 | 0.4 |
| hPAH_NGG2_F9E9_AtoG | 468 | 1.9 | 0.5 |
| hPAH_NGG2_F8E9_AtoG | 469 | 0.6 | 0.4 |
| hPAH_NGG2_F7E9_AtoG | 470 | 0.1 | 0.4 |
| hPAH_NGG2_F15E11_AtoG | 471 | 1.1 | 0.3 |
| hPAH_NGG2_F14E11_AtoG | 472 | 1.6 | 0.4 |
| hPAH_NGG2_F13E11_AtoG | 473 | 3.2 | 0.5 |
| hPAH_NGG2_F12E11_AtoG | 474 | 3.6 | 0.5 |
| hPAH_NGG2_F11E11_AtoG | 475 | 4.5 | 0.7 |
| hPAH_NGG2_F10E11_AtoG | 476 | 2.4 | 0.4 |
| hPAH_NGG2_F9E11_AtoG | 477 | 2.2 | 0.6 |
| hPAH_NGG2_F8E11_AtoG | 478 | 0.4 | 0.4 |
| hPAH_NGG2_F7E11_AtoG | 479 | 0.1 | 0.3 |
| hPAH_NGG2_F15E13_AtoG | 480 | 0.1 | 0.3 |
| hPAH_NGG2_F14E13_AtoG | 481 | 0.4 | 0.3 |
| hPAH_NGG2_F13E13_AtoG | 482 | 1.0 | 0.4 |
| hPAH_NGG2_F12E13_AtoG | 483 | 1.2 | 0.4 |
| hPAH_NGG2_F11E13_AtoG | 484 | 1.6 | 0.6 |
| hPAH_NGG2_F10E13_AtoG | 485 | 2.2 | 0.4 |
| hPAH_NGG2_F9E13_AtoG | 486 | 1.7 | 0.5 |
| hPAH_NGG2_F8E13_AtoG | 487 | 1.2 | 0.4 |
| hPAH_NGG2_F7E13_AtoG | 488 | 0.2 | 0.3 |
| hPAH_NGG2_F15E15_AtoG | 489 | 0.1 | 0.3 |
| hPAH_NGG2_F14E15_AtoG | 490 | 0.01 | 0.3 |
| hPAH_NGG2_F13E15_AtoG | 491 | 0.02 | 0.3 |
| hPAH_NGG2_F12E15_AtoG | 492 | 0.1 | 0.4 |
| hPAH_NGG2_F11E15_AtoG | 493 | 0.03 | 0.5 |
| hPAH_NGG2_F10E15_AtoG | 494 | 0.9 | 0.5 |
| hPAH_NGG2_F9E15_AtoG | 495 | 1.1 | 0.4 |
| hPAH_NGG2_F8E15_AtoG | 496 | 0.1 | 0.3 |
| hPAH_NGG2_F7E15_AtoG | 497 | 0.1 | 0.5 |

[0291] In primary human hepatocytes, 50,000 cells were transfected with 250 ng of mRNA, 50 ng of tagRNA and 15 ng of egRNA formulated in 10 μL of Opti-MEM and 0.75 uL of Messenger Max. The transfection mixes and cells were added to 96-well plates and incubated at 37° C., 500 CO2 for 72 hirs prior to genomic DNA extraction via QuickExtract. Editing efficacy was measured using amplicon sequencing using primers flanking the PAH gene.

[0292] Table 17 shows the editing efficacies achieved with NGG1 and NGG2 tagRNAs. Overall, both NGG1 and NGG2 tagRNA compositions successfully corrected the R408W mutation in HTEK293T cells with minimal indels. Certain compositions performed better than others.

[0293] Table 18B shows the editing efficacies achieved with various egRNAs in primary human hepatocytes (tagRNA sequences are shown in Table 18A). Some egRNAs compositions increase editing efficiency relative to others. The editing efficiencies and indel percentages shown in the table are the average of 2 independent experiments.

TABLE 18A
SURROGATE tagRNA

| NAME | SEQUENCE^{1,2} | SEQ ID NO: |
|---|---|---|
| hPAH_NGG1 | mU*mA*mG*rCrGrArArCrUrGrArGrArArGrGrGrCrCrGrGrUrUrUrUrAr | 791 |
| | GrAmGmCmUmAmGmAmAmAmUmAmGmCrArArGrUrUrArArArArUr | |
| | ArArGrGrCrUrArGrUrCrCrGrUrUrArUrCmAmAmCmUmUmGmAmAmA | |
| | mAmAmGmUmGmGmCmAmCmCmGmAmGmUmCmGmGmUmGmCrA | |
| | rCrArArUrArCrCrCrCrGrGrCrCrCrUrUrCrU*mC*mA*mG | |
| hPAH_NGG2 | mA*mC*mU*rUrUrGrCrUrGrCrCrArCrArArUrArCrCrUrGrUrUrUrUrArG | 792 |
| | rAmGmCmUmAmGmAmAmAmUmAmGmCrArArGrUrUrArArArArUrAr | |
| | ArGrGrCrUrArGrUrCrCrGrUrUrArUrCmAmAmCmUmUmGmAmAmAm | |
| | AmAmGmUmGmGmCmAmCmCmGmAmGmUmCmGmGmUmGmCrGr | |
| | ArGrArArGrGrGrGrCrGrArGrGrUrArUrUrGrUrG*mG*mC*mA | |

¹For RNA, T is U; U are T in the sequence listing. For each entry, the spacer sequence is underlined and the extension arm is bold.
²For the sequences: *, phosphorothioate modification; mN, 2′O-methyl modification; rN, unmodified ribonucleotide; i2FN, Int Fluoro modification. N = A, C, T/U, G.

TABLE 18B
EDITING AND INDEL EFFICIENCY IN
PRIMARY HUMAN HEPATOCYTE CELLS

| | SEQ | | SEQ | Editing | Indels |
|---|---|---|---|---|---|
| tagRNA Name | ID NO: | egRNA Name | ID NO: | (%) | (%) |
| hPAH_NGG1 | 791 | hPAH_egRNA_118038 | 527 | 6 | 1.2 |
| hPAH_NGG1 | 791 | hPAH_egRNA_118030 | 528 | 11 | 0.7 |
| hPAH_NGG1 | 791 | hPAH_egRNA_117991 | 529 | 13 | 0.3 |
| hPAH_NGG1 | 791 | hPAH_egRNA_117964 | 530 | 11 | 0.6 |
| hPAH_NGG1 | 791 | hPAH_egRNA_117958 | 531 | 13 | 1.8 |
| hPAH_NGG1 | 791 | hPAH_egRNA_117951 | 532 | 11 | 0.5 |
| hPAH_NGG1 | 791 | hPAH_egRNA_117891 | 533 | 15 | 2.2 |
| hPAH_NGG1 | 791 | hPAH_egRNA_117884 | 534 | 13 | 0.5 |
| hPAH_NGG1 | 791 | hPAH_egRNA_117878 | 535 | 20 | 1.8 |
| hPAH_NGG1 | 791 | hPAH_egRNA_117856 | 536 | 12 | 1.3 |
| hPAH_NGG2 | 792 | hPAH_egRNA_117802 | 537 | 12 | 0.5 |
| hPAH_NGG2 | 792 | hPAH_egRNA_117927 | 538 | 16 | 0.4 |
| hPAH_NGG2 | 792 | hPAH_egRNA_118009 | 539 | 13 | 0.6 |
| hPAH_NGG2 | 792 | hPAH_egRNA_117809 | 540 | 11 | 0.7 |
| hPAH_NGG2 | 792 | hPAH_egRNA_117928 | 541 | 15 | 0.6 |
| hPAH_NGG2 | 792 | hPAH_egRNA_118032 | 542 | 9 | 0.7 |
| hPAH_NGG2 | 792 | hPAH_egRNA_117829 | 543 | 20 | 0.8 |
| hPAH_NGG2 | 792 | hPAH_egRNA_117947 | 544 | 9 | 0.7 |
| hPAH_NGG2 | 792 | hPAH_egRNA_118042 | 545 | 11 | 0.5 |
| hPAH_NGG2 | 792 | hPAH_egRNA_117853 | 546 | 19 | 1.1 |
| hPAH_NGG2 | 792 | hPAH_egRNA_117948 | 547 | 18 | 1.1 |
| hPAH_NGG2 | 792 | hPAH_egRNA_117860 | 548 | 22 | 1.2 |
| hPAH_NGG2 | 792 | hPAH_egRNA_117955 | 549 | 22 | 0.8 |
| hPAH_NGG2 | 792 | hPAH_egRNA_117870 | 550 | 16 | 1.8 |
| hPAH_NGG2 | 792 | hPAH_egRNA_117956 | 551 | 23 | 1.0 |
| hPAH_NGG2 | 792 | hPAH_egRNA_117871 | 552 | 14 | 2.7 |
| hPAH_NGG2 | 792 | hPAH_egRNA_117982 | 553 | 14 | 0.5 |
| hPAH_NGG2 | 792 | hPAH_egRNA_117883 | 554 | 20 | 1.2 |
| hPAH_NGG2 | 792 | hPAH_egRNA_117983 | 555 | 7 | 0.3 |

### Example 2

### tagRNAs with Chemical Modifications

[0294] tagRNAs targeting an ATP71B gene with chemical modifications at the Editing Template (“ET”) region and/or FBS region were contemplated, as shown in FIG. 11. Chemically modified tagRNAs generated are presented in the Table 19 below. ‘in’ indicates 2′ O-methyl RNA base; ‘r’ indicates RNA base; ‘i2F’ indicates internal 2′ Fluoro RNA base. The tagRNAs were tested in two hepatic cell lines, HTEK293T and Huh7 and the data is presented below in Table 20. Certain chemical modifications increased editing efficiency of the tagRNAs.

TABLE 19
CHEMICALLY MODIFIED tagRNAs

| | | SEQ | |
|---|---|---|---|
| tagRNA | ET | ID NO: | FBS |
| PG g060 | mGmUmGmAmAmCmAmCmCmCmCmUmUmG | 556 | rGrGrCrGrUrGrGrC |
| PG g061 | rGrUrGrArArCrArCrCrCrCrUrUrG | 557 | mGmGmCmGmUmGmGmC |
| PG g062 | mGmUmGmAmAmCmAmCmCmCmCmUmUmG | 556 | mGmGmCmGmUmGmGmC |
| PG g063 | rGmUrGmArAmCrAmCrCmCrCmUrUmG | 558 | rGrGrCrGrUrGrGrC |
| PG g064 | rGrUrGrArArCrArCrCrCrCrUrUrG | 557 | rGmGrCmGrUmGrGmC |
| PG g065 | rGmUrGmArAmCrAmCrCmCrCmUrUmG | 558 | rGmGrCmGrUmGrGmC |
| PG g066 | rGrUmGrArAmCrArCmCrCrCmUrUrG | 559 | rGrGrCrGrUrGrGrC |
| PG g067 | rGrUrGrArArCrArCrCrCrCrUrUrG | 557 | mGrGrCmGrUrGmGrC |
| PG g068 | rGrUmGrArAmCrArCmCrCrCmUrUrG | 559 | mGrGrCmGrUrGmGrC |
| PG g069 | /i2FG//i2FU//i2FG//i2FA//i2FA//i2FC// | 560 | rGrGrCrGrUrGrGrC |
| | i2FA//i2FC//i2FC//i2FC//i2FC//i2FU// | | |
| | i2FU//i2FG/ | | |
| PG g070 | rGrUrGrArArCrArCrCrCrCrUrUrG | 557 | /i2FG//i2FG//i2FC//i2FG//i2FU// |
| | | | i2FG//i2FG//i2FC/ |
| PG g071 | /i2FG//i2FU//i2FG//i2FA//i2FA//i2FC// | 560 | /i2FG//i2FG//i2FC//i2FG//i2FU// |
| | i2FA//i2FC//i2FC//i2FC//i2FC//i2FU// | | i2FG//i2FG//i2FC/ |
| | i2FU//i2FG/ | | |
| PG g072 | rG/i2FU/rG/i2FA/rA/i2FC/rA/i2FC/rC/i2FC/ | 561 | rGrGrCrGrUrGrGrC |
| | rC/i2FU/rU/i2FG | | |
| PG g073 | rGrUrGrArArCrArCrCrCrCrUrUrG | 557 | rG/i2FG/rC/i2FG/rU/i2FG/rG/i2FC |
| PG g074 | rG/i2FU/rG/i2FA/rA/i2FC/rA/i2FC/rC/i2FC/ | 561 | rG/i2FG/rC/i2FG/rU/i2FG/rG/i2FC |
| | rC/i2FU/rU/i2FG | | |
| PG g075 | rGrU/i2FG/rArA/i2FC/rArC/i2FC/rCrC/i2FU/ | 562 | rGrGrCrGrUrGrGrC |
| | rUrG | | |
| PG g076 | rGrUrGrArArCrArCrCrCrCrUrUrG | 557 | /i2FG/rGrC/i2FG/rUrG/i2FG/rC |
| PG g077 | rGrU/i2FG/rArA/i2FC/rArC/i2FC/rCrC/i2FU/ | 562 | /i2FG/rGrC/i2FG/rUrG/i2FG/rC |
| | rUrG | | |
| BK g071 | GUGAACACCCCUUG | 97 | GGCGUGGC |

TABLE 20
EDITING EFFICIENCY WITH CHEMICALLY
MODIFIED tagRNAs

| tagRNA | Modification Type | HEK293T | Huh7 |
|---|---|---|---|
| PG g060 | ET14OMe | 0.1% | 0.2% |
| PG g061 | FBS8OMe | 0.1% | 0.3% |
| PG g062 | ET14OMe•FBS8OMe | 0.2% | 0.2% |
| PG g063 | ET7OMe | 0.2% | 0.1% |
| PG g064 | FBS4OMe | 20.9% | 5.8% |
| PG g065 | ET7OMe•FBS4OMe | 0.1% | 0.2% |
| PG g066 | ET4OMe | 0.1% | 0.2% |
| PG g067 | FBS3OMe | 14.4% | 5.3% |
| PG g068 | ET4OMe•FBS3OMe | 0.1% | 0.2% |
| PG g069 | ET14F | 0.1% | 0.1% |
| PG g070 | FBS8F | 22.0% | 7.9% |
| PG g071 | ET14F•FBS8F | 0.1% | 3.1% |
| PG g072 | ET7F | 0.5% | 0.1% |
| PG g073 | FBS4F | 33.8% | 11.4% |
| PG g074 | ET7F•FBS4F | 0.1% | 0.2% |
| PG g075 | ET4F | 25.4% | 7.8% |
| PG g076 | FBS3F | 30.6% | 7.9% |
| PG g077 | ET4F•FBS3F | 42.4% | 10.6% |
| BK g071 | — | 32.8% | 9.9% |

### Example 3

### Methods and Compositions for Editing the A1ATD Gene

[0295] The lack of NGG PAMs around the mutation site of the SERPINA1 (also referred to herein as A1ATD) gene necessitated a search for alternative Cas9 proteins as a component for the RT editing system.

[0296] A comprehensive screening was done of the various alternative Cas9s that are capable of the E342K correction via RT editing. The results are shown in Table 21 and are the average indel % of each Cas9 with a tool gRNA was assessed from three independent experiments with replicates. Cas9 proteins that were considered for further evaluation are Slutr1Cas9, Ssch1Cas9, Ssch3Cas9, Ssi5Cas9, SpRYCas9, SpRYcCas9, and SSACas9.

TABLE 21
EFFICIENCIES OF CAS PROTEINS

| | | SEQ ID | Indel |
|---|---|---|---|
| Cas9 name | PAM | NO: | (%) |
| iSpyMac | NAA | 147 | 2.3 |
| Sag3Cas9 | NNaAAa | 152 | 2.2 |
| Sha4Cas9 | NNGRC | 144 | 43.3 |
| Shy1Cas9 | NNaAAa | 151 | 2.6 |
| Slutr1Cas9 | NNGAa | 153 | 87.9 |
| Sma2Cas9 | NHGYNAN(A > B) | 157 | 2.1 |
| SpRYCas9 | NNN | 155 | 74.3 |
| SpRYcCas9 | NNN | 156 | 74.3 |
| Sro1Cas9 | NNGA | 143 | 2.1 |
| SSACas9 | NNAGAAA | 158 | 88.6 |
| Ssch1Cas9 | NNGA | 142 | 45.6 |
| Ssch3Cas9 | NNGA | 154 | 42.3 |
| Ssci4Cas9 | NNGA | 150 | 2.0 |
| Ssi5Cas9 | NNGA | 148 | 46.2 |
| Ssi8Cas9 | NNGA | 149 | 3.7 |
| SsuCas9 | NNGAAAa | 145 | 1.6 |

[0297] Huh7 cell line was engineered to contain the E342K disease mutation in the SERPINA1 gene, then used as model for mutation correction experiments. Twenty spacers close to the mutation site were designed with two scaffold variants. One sgRNA can be tested with multiple of the Cas9 proteins shown above. A total of 57 combinations with 3 replicates were tested.

[0298] 20,000 HuH7 cells carrying the E342K mutation were transfected using MessengerMax with an mRNA encoding the RT Editor, and a chemically synthesized tagRNA. Specifically, 125 ng of mRNA, and 1 pmol tagRNA were diluted to 10 μl and mixed with 30 μl Opti-MEM containing 0.5 μl MessengerMax. The lipoplexes were mixed with the cells in suspension and plated into 96-well plates. After transfection, cells were grown at 37° C., 5% CO2 in DMEM media supplemented with 10% serum for 3 days prior to cell lysis and genomic DNA extraction with QuickExtract solution. Editing of the SERPINA target locus was assessed using amplicon sequencing using primers flanking the gene.

[0299] Table 22A and Table 22B show information related to the editing efficacies (average of 3 independent experiments) achieved with SpRYcCas9-based RT Editor (pAM033; mRNA sequence SEQ TD NO: 1330, protein sequence SEQ ID NO: 1329) and SsaCas9-based RT Editor (pAM035; mRNA sequence SEQ TD NO: 1037, protein sequence SEQ ID NO: 1036).

TABLE 22A
EDITING EFFICIENCIES

| | | SEQ | Edit | Indel |
|---|---|---|---|---|
| RT Editor | tagRNA Name | ID NO: | (%) | (%) |
| SsaCas9 RT Editor | N20_NNAGAAA_+5_S_F12E8_TtoC | 623 | 8 | 0.3 |
| SsaCas9 RT Editor | N20_NNAGAAA_+5_S_F11E8_TtoC | 624 | 13 | 0.5 |
| SsaCas9 RT Editor | N20_NNAGAAA_+5_S_F10E8_TtoC | 625 | 11 | 0.4 |
| SsaCas9 RT Editor | N20_NNAGAAA_+5_S_F9E8_TtoC | 626 | 15 | 0.7 |
| SsaCas9 RT Editor | N20_NNAGAAA_+5_S_F8E8_TtoC | 627 | 19 | 1.0 |
| SsaCas9 RT Editor | N20_NNAGAAA_+5_S_F7E8_TtoC | 628 | 14 | 0.7 |
| SsaCas9 RT Editor | N20_NNAGAAA_+5_S_F12E10_TtoC | 629 | 10 | 0.3 |
| SsaCas9 RT Editor | N20_NNAGAAA_+5_S_F11E10_TtoC | 630 | 16 | 0.5 |
| SsaCas9 RT Editor | N20_NNAGAAA_+5_S_F10E10_TtoC | 631 | 10 | 0.4 |
| SsaCas9 RT Editor | N20_NNAGAAA_+5_S_F9E10_TtoC | 632 | 15 | 0.4 |
| SsaCas9 RT Editor | N20_NNAGAAA_+5_S_F8E10_TtoC | 633 | 15 | 0.6 |
| SsaCas9 RT Editor | N20_NNAGAAA_+5_S_F7E10_TtoC | 634 | 12 | 0.6 |
| SsaCas9 RT Editor | N20_NNAGAAA_+5_S_F12E12_TtoC | 635 | 9 | 2.0 |
| SsaCas9 RT Editor | N20_NNAGAAA_+5_S_F11E12_TtoC | 636 | 10 | 3.0 |
| SsaCas9 RT Editor | N20_NNAGAAA_+5_S_F10E12_TtoC | 637 | 9 | 1.8 |
| SsaCas9 RT Editor | N20_NNAGAAA_+5_S_F9E12_TtoC | 638 | 12 | 2.9 |
| SsaCas9 RT Editor | N20_NNAGAAA_+5_S_F8E12_TtoC | 639 | 11 | 2.7 |
| SsaCas9 RT Editor | N20_NNAGAAA_+5_S_F7E12_TtoC | 640 | 9 | 1.8 |
| SsaCas9 RT Editor | N20_NNAGAAA_+5_S_F12E14_TtoC | 641 | 8 | 2.0 |
| SsaCas9 RT Editor | N20_NNAGAAA_+5_S_F11E14_TtoC | 642 | 8 | 2.4 |
| SsaCas9 RT Editor | N20_NNAGAAA_+5_S_F10E14_TtoC | 643 | 7 | 1.6 |
| SsaCas9 RT Editor | N20_NNAGAAA_+5_S_F9E14_TtoC | 644 | 8 | 1.8 |
| SsaCas9 RT Editor | N20_NNAGAAA_+5_S_F8E14_TtoC | 645 | 10 | 1.5 |
| SsaCas9 RT Editor | N20_NNAGAAA_+5_S_F7E14_TtoC | 646 | 8 | 1.1 |
| SsaCas9 RT Editor | N20_NNAGAAA_+5_S_F12E16_TtoC | 647 | 11 | 2.3 |
| SsaCas9 RT Editor | N20_NNAGAAA_+5_S_F11E16_TtoC | 648 | 10 | 2.5 |
| SsaCas9 RT Editor | N20_NNAGAAA_+5_S_F10E16_TtoC | 649 | 8 | 2.2 |
| SsaCas9 RT Editor | N20_NNAGAAA_+5_S_F9E16_TtoC | 650 | 10 | 3.8 |
| SsaCas9 RT Editor | N20_NNAGAAA_+5_S_F8E16_TtoC | 651 | 11 | 3.6 |
| SsaCas9 RT Editor | N20_NNAGAAA_+5_S_F7E16_TtoC | 652 | 10 | 2.4 |
| SpRYcCas9 RT Editor | N20_NAA_+1_S_F12E4_TtoC | 653 | 31 | 0.2 |
| SpRYcCas9 RT Editor | N20_NAA_+1_S_F11E4_TtoC | 654 | 31 | 0.2 |
| SpRYcCas9 RT Editor | N20_NAA_+1_S_F10E4_TtoC | 655 | 47 | 0.4 |
| SpRYcCas9 RT Editor | N20_NAA_+1_S_F9E4_TtoC | 656 | 39 | 0.2 |
| SpRYcCas9 RT Editor | N20_NAA_+1_S_F8E4_TtoC | 657 | 49 | 0.2 |
| SpRYcCas9 RT Editor | N20_NAA_+1_S_F7E4_TtoC | 658 | 36 | 0.2 |
| SpRYcCas9 RT Editor | N20_NAA_+1_S_F12E6_TtoC | 659 | 57 | 0.6 |
| SpRYcCas9 RT Editor | N20_NAA_+1_S_F11E6_TtoC | 660 | 63 | 0.5 |
| SpRYcCas9 RT Editor | N20_NAA_+1_S_F10E6_TtoC | 661 | 68 | 0.5 |
| SpRYcCas9 RT Editor | N20_NAA_+1_S_F9E6_TtoC | 662 | 51 | 0.6 |
| SpRYcCas9 RT Editor | N20_NAA_+1_S_F8E6_TtoC | 663 | 68 | 0.6 |
| SpRYcCas9 RT Editor | N20_NAA_+1_S_F7E6_TtoC | 664 | 49 | 0.3 |
| SpRYcCas9 RT Editor | N20_NAA_+1_S_F12E8_TtoC | 665 | 21 | 0.8 |
| SpRYcCas9 RT Editor | N20_NAA_+1_S_F11E8_TtoC | 666 | 33 | 1.5 |
| SpRYcCas9 RT Editor | N20_NAA_+1_S_F10E8_TtoC | 667 | 48 | 2.2 |
| SpRYcCas9 RT Editor | N20_NAA_+1_S_F9E8_TtoC | 668 | 44 | 1.5 |
| SpRYcCas9 RT Editor | N20_NAA_+1_S_F8E8_TtoC | 669 | 65 | 2.7 |
| SpRYcCas9 RT Editor | N20_NAA_+1_S_F7E8_TtoC | 670 | 47 | 1.7 |
| SpRYcCas9 RT Editor | N20_NAA_+1_S_F12E10_TtoC | 671 | 47 | 2.3 |
| SpRYcCas9 RT Editor | N20_NAA_+1_S_F11E10_TtoC | 672 | 45 | 1.8 |
| SpRYcCas9 RT Editor | N20_NAA_+1_S_F10E10_TtoC | 673 | 52 | 1.6 |
| SpRYcCas9 RT Editor | N20_NAA_+1_S_F9E10_TtoC | 674 | 44 | 1.5 |
| SpRYcCas9 RT Editor | N20_NAA_+1_S_F8E10_TtoC | 675 | 63 | 2.2 |
| SpRYcCas9 RT Editor | N20_NAA_+1_S_F7E10_TtoC | 676 | 31 | 0.9 |
| SpRYcCas9 RT Editor | N20_NAA_+1_S_F12E12_TtoC | 677 | 61 | 2.3 |
| SpRYcCas9 RT Editor | N20_NAA_+1_S_F11E12_TtoC | 678 | 46 | 2.7 |
| SpRYcCas9 RT Editor | N20_NAA_+1_S_F10E12_TtoC | 679 | 57 | 1.7 |
| SpRYcCas9 RT Editor | N20_NAA_+1_S_F9E12_TtoC | 680 | 25 | 1.0 |
| SpRYcCas9 RT Editor | N20_NAA_+1_S_F8E12_TtoC | 681 | 52 | 1.5 |
| SpRYcCas9 RT Editor | N20_NAA_+1_S_F7E12_TtoC | 682 | 20 | 0.5 |

TABLE 22B
RT EDITOR SEQUENCES

| | Protein Sequence | |
|---|---|---|
| Name | (SEQ ID NO:) | mRNA Sequence (SEQ ID NO:) |
| pAM035 | 1036 | 1037 |
| pAM033 | MKRTADGSEFESPKKKRKVE | AGGAAATAAGAGAGAAAAGAAGAGTAAGAAGAAATAT |
| | KKYSIGLDIGTNSVGWAVITD | AAGAGCCACCATGAAACGGACAGCCGACGGAAGCGAG |
| | DYKVPSKKFKVLGNTNRKSI | TTCGAGTCACCAAAGAAGAAGCGGAAAGTCgaaaaaaagtaca |
| | KKNLMGALLFDSGETAEATR | gcatcggcctagacatcggaaccaacagcgtgggctgggccgtgatcacggacgactaca |
| | LKRTARRRYTRRKNRIRYLQE | aggtgcccagcaagaagttcaaagtgctgggcaacacaaacagaaagagcatcaaaaaga |
| | IFANEMAKLDDSFFQRLEESF | acctgatgggcgccctgctgttcgacagcggcgagacagccgaggccaccagactgaagc |
| | LVEEDKKNERHPIFGNLADEV | ggaccgccaggagacggtacacccgccggaagaacagaataagatacctgcaggagattt |
| | AYHRNYPTIYHLRKKLADSPE | tcgccaacgaaatggccaagctggacgacagcttctttcagaggctggaagagagcttcctg |
| | KADLRLIYLALAHIIKFRGHFL | gtggaggaggataagaagaacgaaagacaccccatattcggcaacctggccgacgaggtg |
| | IEGKLNAENSDVAKLFYQLIQ | gcgtaccacagaaactaccctaccatctaccacctgcgaaagaagctggcggacagcccc |
| | TYNQLFEESPLDEIEVDAKGIL | gagaaggccgacctgagactgatctacctggccctagcccacatcatcaagtttcgcggaca |
| | SARLSKSKRLEKLIAVFPNEK | tttcctgatcgagggcaaactgaacgccgagaacagcgacgtggccaaactgttctaccagc |
| | KNGLFGNIIALALGLTPNFKS | tgattcagacctacaaccagctgttcgaggagagccctctggacgaaatcgaagtggacgc |
| | NFDLTEDAKLQLSKDTYDDD | caaaggcatcctcagcgcacggctgagcaagagcaagcggctggaaaagctgatcgctgt |
| | LDELLGQIGDQYADLFSAAK | gttccctaacgagaagaaaaacggcctgttcggcaacataatcgccctggccctgggcctga |
| | NLSDAILLSDILRSNSEVTKAP | caccaaacttcaagagcaacttcgacctgacagaggatgccaagctgcaactgtccaaggat |
| | LSASMVKRYDEHHQDLALLK | acatacgacgacgatctggacgaactgctgggccagatcggcgaccagtacgccgatctgt |
| | TLVRQQFPEKYAEIFKDDTKN | ttagcgccgccaagaacctgagcgacgccatcctgctgagcgacattctgcgaagcaattcc |
| | GYAGYVGADKKLRKRSGKL | gaggtcaccaaggcccccctaagcgccagcatggtgaagagatacgacgagcaccacca |
| | ATEEEFYKFIKPILEKMDGAE | ggacctggcactgctcaagaccctggtcagacagcaattccctgagaaatacgctgaaatct |
| | ELLAKLNRDDLLRKQRTFDN | tcaaggacgacaccaagaacggatacgcaggctacgtcggagccgacaagaagctgagaa |
| | GSIPHQIHLKELHAILRRQEEF | agagatcaggaaagctggccaccgaggaggagttctacaagttcatcaaacccatcctgga |
| | YPFLKENREKIEKILTFRIPYY | gaaaatggacggcgccgaggagctgctggccaagctgaaccgggacgacctgctgcgga |
| | VGPLARGNSRFAWLTRKSEE | aacagagaaccttcgacaatggcagcatcccccaccagatccacctgaaggagctccacgc |
| | AITPWNFEEVVDKGASAQSFI | catcctgagaagacaggaggagttctacccattcctgaaggagaatagagaaaaaatcgag |
| | ERMTNFDEQLPNKKVLPKHS | aagatcctcaccttcagaatcccatactacgtgggacccctggccagaggcaacagccggtt |
| | LLYEYFTVYNELTKVKYVTE | tgcatggctgacaagaaagagcgaggaagcgatcaccccgtggaacttcgaggaggtggt |
| | RMRKPEFLSGEQKKAIVDLLF | ggacaagggggccagcgcccagagcttcatcgagcggatgaccaacttcgacgagcagct |
| | KTNRKVTVKQLKEDYFKKIE | gcctaacaagaaagtgctacctaagcacagcctactgtacgagtactttacagtgtacaacg |
| | CFDSVEIIGVEDRFNASLGTY | agctgacaaaggtcaagtacgtgaccgaaagaatgagaaagcctgaattcctgagcggcga |
| | HDLLKIIKDKDFLDNEENEDIL | gcagaagaaagccatcgtggacctcctgttcaagaccaacagaaaagtgacagtaaagcag |
| | EDIVLTLTLFEDREMIEERLKT | ctgaaggaggactacttcaagaagatcgaatgcttcgacagcgtggaaatcatcggcgtaga |
| | YAHLFDDKVMKQLKRRHYT | agaccgattcaacgcaagcctgggcacctaccacgacctgctgaaaataatcaaggataag |
| | GWGRLSRKMINGIRDKQSGK | gatttcctggataacgaggaaaacgaagacattctggaagacatagtgctgacactgactct |
| | TILDFLKSDGFSNRNFMQLIH | gttcgaagacagagagatgatcgaggaacggctgaagacctatgcccacctgtttgacgata |
| | DDSLTFKEEIEKAQVSGQGDS | aagtgatgaagcaactcaagaggcggcactacaccggctggggcagactgagcagaaaaat |
| | LHEQIADLAGSPAIKKGILQT | gatcaacggaatcagagacaagcagagcggcaagacgatcctggattttctaaaatccgac |
| | VKIVDELVKVMGHKPENIVIE | ggcttcagcaacaggaacttcatgcaactaatccacgacgattccctgacattcaaggaaga |
| | MARENQTTTKGLQQSRERKK | gatcgaaaaggcccaggtaagcggccagggcgacagcctccacgaacagatcgcggacc |
| | RIEEGIKELESQILKENPVENT | tggccggcagcccagccatcaaaaaaggcatcctgcagaccgtcaagatcgtggacgagc |
| | QLQNEKLYLYYLQNGRDMY | tggtcaaagtaatgggccacaagccagagaatatagtgatagagatggcaagagaaaacca |
| | VDQELDINRLSDYDVDAIVPQ | gaccacaacaaaaggcctgcaacagtccagagaacgaaagaagagaatcgaagagggca |
| | SFIKDDSIDNKVLTRSVENRG | tcaaagagctggaaagccagatactgaaggagaaccccgtggagaacacccagctgcaga |
| | KSDNVPSEEVVKKMKNYWR | acgagaagctgtacctgtactacctacagaacggacgggacatgtacgtggaccaggagct |
| | QLLNAKLITQRKFDNLTKAER | ggacattaaccggctaagcgactacgacgtggacgccatcgtgcctcagagctttatcaagg |
| | GGLSEADKAGFIKRQLVETRQ | atgactcgatcgacaacaaggtgctcaccagatcggtggagaacaggggcaagagcgaca |
| | ITKHVARILDSRMNTKRDKN | acgtgccttccgaggaggtggtgaagaagatgaagaactattggagacagctgctgaacgc |
| | DKPIREVKVITLKSKLVSDFR | caaactcatcacccagagaaagttcgacaacctgacaaaggccgagagaggcggcctgag |
| | KDFQLYKVRDINNYHHAHDA | cgaagccgacaaggccggcttcataaaaagacaactggtggagacaagacagatcacaaa |
| | YLNAVVGTALIKKYPKLESEF | gcacgtggccagaatcctagactcccggatgaacaccaagagagacaagaacgacaagc |
| | VYGDYKVYDVRKMIAKSEQE | ctatacgggaggtgaaggtgatcacactgaaaagcaagctcgtgagcgatttccggaagga |
| | IGKATAKRFFYSNIMNFFKTE | cttccagctgtacaaagtgcgggacatcaacaactaccaccacgcccacgacgcttacctga |
| | VKLANGEIRKRPLIETNGETG | atgctgtggtgggaaccgcactcatcaaaaagtacccaaagctggaatccgaattcgtgtac |
| | EVVWNKEKDFATVRKVLAM | ggcgactacaaggtgtacgacgtgcgcaagatgatcgccaagagcgaacaggaaatcggc |
| | PQVNIVKKTEVQTGGFSKESI | aaagccacagccaagagattcttctacagcaacatcatgaactttttcaagacagaagtgaa |
| | RPKRNSDKLIARKKDWDPKK | gctggccaacggcgagatcaggaagaggcccctcattgaaaccaacggggaaaccggcga |
| | YGGFLWPTVAYSVLVVAKVE | ggtggtgtggaacaaagagaaggacttcgccacagtgagaaaggtcctggccatgcccca |
| | KGKSKKLKSVKELLGITIMER | ggtgaacatcgtcaaaaagaccgaagtgcagaccgggggattcagcaaagagtccattaga |
| | SSFEKNPIDFLEAKGYKEVKK | cctaagagaaacagcgacaaactgatcgcacggaagaaggactgggatcctaaaaaatac |
| | DLIIKLPKYSLFELENGRKRM | ggaggattcctgtggccgaccgtggcctacagcgtgctggtggtagccaaggtggaaaag |
| | LASAKQLQKGNELALPSKYV | ggcaaaagcaagaagctgaagtccgtgaaggaactgctgggcatcacaatcatggaacgg |
| | NFLYLASHYEKLKGSPEDNE | agcagctttgaaaagaacccaatcgacttcctggaagccaagggctacaaggaggtgaaaa |
| | QKQLFVEQHKHYLDEIIEQISE | aggacttaatcatcaagctgcctaagtacagcctgttcgagctggagaacggccggaagag |
| | FSKRVILADANLDKVLSAYN | aatgctggccagtgccaagcagctgcaaaagggcaatgagctggccctgcccagcaagtat |
| | KHRDKPIREQAENIIHLFTLTR | gttaacttcctgtacctggccagccactacgagaaactcaaaggcagccctgaagacaacga |
| | LGAPRAFKYFDTTIDPKQYRS | acagaagcaactcttcgtggagcaacacaaacactacctggatgagataatcgagcaaatct |
| | TKEVLDATLIHQSITGLYETRI | ccgagttcagcaagcgggtcatcctagcggacgccaacctggacaaggtgctgagcgcct |
| | DLSQLGGDSGGSSGGSKRTA | acaacaagcaccgggacaaacctatccgcgagcaggcagagaacatcatccacctgttcac |
| | DGSEFESPKKKRKVSGGSSGG | cctgacccggctgggcgcacctcgggccttcaaatacttcgacaccacaatcgaccctaagc |
| | STLNIEDEYRLHETSKEPDVSL | agtacagaagcacaaaggaagtgctggacgccaccctgatccaccagagcattacgggac |
| | GSTWLSDFPQAWAETGGMG | tatacgaaacacgcatcgatctgtcccagctgggaggcgacTCCGGCGGAAGCT |
| | LAVRQAPLIIPLKATSTPVSIK | CTGGTGGCAGCAAGCGGACCGCCGACGGCTCTGAATTC |
| | QYPMSQEARLGIKPHIQRLLD | GAGAGCCCTAAGAAGAAAAGAAAGGTGAGCGGAGGCT |
| | QGILVPCQSPWNTPLLPVKKP | CTAGCGGCGGAAGCACCCTGAACATTGAAGACGAGTAT |
| | GTNDYRPVQDLREVNKRVED | AGACTGCATGAAACAAGCAAGGAACCCGACGTGTCCCT |
| | IHPTVPNPYNLLSGLPPSHQW | GGGCTCCACCTGGCTGTCCGACTTTCCCCAGGCCTGGGC |
| | YTVLDLKDAFFCLRLHPTSQP | CGAGACAGGAGGAATGGGCCTGGCCGTGCGGCAGGCAC |
| | LFAFEWRDPEMGISGQLTWT | CCCTGATCATCCCTCTGAAGGCCACCTCTACACCCGTGA |
| | RLPQGFKNSPTLFNEALHRDL | GCATCAAGCAGTACCCTATGTCTCAGGAGGCCAGACTG |
| | ADFRIQHPDLILLQYVDDLLL | GGCATCAAGCCTCACATCCAGAGGCTGCTGGACCAGGG |
| | AATSELDCQQGTRALLQTLG | CATCCTGGTGCCATGCCAGAGCCCCTGGAACACACCACT |
| | NLGYRASAKKAQICQKQVKY | GCTGCCCGTGAAGAAGCCAGGCACCAATGACTATAGAC |
| | LGYLLKEGQRWLTEARKETV | CCGTGCAGGATCTGAGAGAGGTGAACAAGAGGGTGGAG |
| | MGQPTPKTPRQLREFLGKAG | GATATCCACCCCACCGTGCCCAACCCTTACAATCTGCTG |
| | FCRLFIPGFAEMAAPLYPLTK | TCCGGCCTGCCCCCTTCTCACCAGTGGTATACAGTGCTG |
| | PGTLFNWGPDQQKAYQEIKQ | GACCTGAAGGATGCCTTCTTTTGTCTGAGACTGCACCCT |
| | ALLTAPALGLPDLTKPFELFV | ACCAGCCAGCCACTGTTCGCCTTTGAGTGGAGGGACCCT |
| | DEKQGYAKGVLTQKLGPWR | GAGATGGGCATCTCTGGCCAGCTGACCTGGACACGCCT |
| | RPVAYLSKKLDPVAAGWPPC | GCCTCAGGGCTTCAAGAATAGCCCAACACTGTTTAACG |
| | LRMVAAIAVLTKDAGKLTMG | AGGCCCTGCACCGCGACCTGGCAGATTTCCGGATCCAG |
| | QPLVILAPHAVEALVKQPPDR | CACCCAGATCTGATCCTGCTGCAGTACGTGGACGATCTG |
| | WLSNARMTHYQALLLDTDR | CTGCTGGCCGCCACCAGCGAGCTGGATTGCCAGCAGGG |
| | VQFGPVVALNPATLLPLPEEG | AACACGCGCCCTGCTGCAGACCCTGGGAAACCTGGGAT |
| | LQHNCLDILAEAHGTRPDLTD | ATAGGGCATCCGCCAAGAAGGCCCAGATCTGTCAGAAG |
| | QPLPDADHTWYTDGSSLLQE | CAGGTGAAGTACCTGGGCTATCTGCTGAAGGAGGGCCA |
| | GQRKAGAAVTTETEVIWAKA | GAGATGGCTGACAGAGGCCAGGAAGGAGACAGTGATG |
| | LPAGTSAQRAELIALTQALKM | GGCCAGCCAACACCCAAGACCCCAAGACAGCTGAGGGA |
| | AEGKKLNVYTDSRYAFATAH | GTTCCTGGGCAAAGCAGGATTTTGCAGGCTGTTCATCCC |
| | IHGEIYRRRGWLTSEGKEIKN | AGGATTCGCAGAGATGGCAGCACCTCTGTACCCACTGA |
| | KDEILALLKALFLPKRLSIIHC | CCAAGCCGGGCACCCTGTTTAATTGGGGCCCTGACCAGC |
| | PGHQKGHSAEARGNRMADQ | AGAAGGCCTATCAGGAGATCAAGCAGGCCCTGCTGACA |
| | AARKAAITETPDTSTLLIENSS | GCACCAGCCCTGGGCCTGCCAGACCTGACCAAGCCTTTC |
| | PSGGSKRTADGSEFESPKKKR | GAGCTGTTTGTGGATGAGAAGCAGGGCTACGCCAAGGG |
| | KVGSGPAAKRVKLD (SEQ ID | CGTGCTGACCCAGAAGCTGGGACCATGGAGACGGCCCG |
| | NO: 1329) | TGGCCTATCTGTCCAAGAAGCTGGACCCAGTGGCAGCA |
| | | GGATGGCCACCATGCCTGAGGATGGTGGCAGCAATCGC |
| | | CGTGCTGACAAAGGATGCCGGCAAGCTGACCATGGGAC |
| | | AGCCACTGGTCATCCTGGCACCACACGCAGTGGAGGCC |
| | | CTGGTGAAGCAGCCTCCAGATCGCTGGCTGTCTAACGCC |
| | | CGGATGACACACTACCAGGCCCTGCTGCTGGACACCGA |
| | | TCGCGTGCAGTTTGGCCCTGTGGTGGCCCTGAATCCAGC |
| | | CACCCTGCTGCCTCTGCCAGAGGAGGGCCTGCAGCACA |
| | | ACTGTCTGGACATCCTGGCAGAGGCACACGGAACAAGG |
| | | CCAGACCTGACCGATCAGCCCCTGCCTGACGCCGATCAC |
| | | ACATGGTATACCGATGGAAGCTCCCTGCTGCAGGAGGG |
| | | CCAGAGGAAGGCAGGAGCAGCAGTGACCACAGAGACA |
| | | GAAGTGATCTGGGCCAAGGCCCTGCCAGCAGGCACATC |
| | | CGCCCAGCGGGCCGAGCTGATCGCCCTGACCCAGGCCC |
| | | TGAAGATGGCCGAGGGCAAGAAGCTGAACGTGTACACA |
| | | GACTCCAGATATGCCTTCGCCACCGCACACATCCACGGA |
| | | GAGATCTACAGGCGCCGGGGCTGGCTGACCTCTGAGGG |
| | | CAAGGAGATCAAGAACAAGGATGAGATCCTGGCCCTGC |
| | | TGAAGGCCCTGTTTCTGCCCAAGCGGCTGAGCATCATCC |
| | | ACTGTCCTGGACACCAGAAGGGACACTCCGCCGAGGCA |
| | | AGGGGCAATCGGATGGCCGACCAGGCCGCCAGAAAGGC |
| | | TGCTATTACTGAAACTCCCGACACTTCCACTCTGCTGAT |
| | | TGAAAACTCCTCCCCTTCTGGCGGCTCAAAAAGAACCGC |
| | | CGACGGCAGCGAATTCGAGTCTCCCAAGAAGAAGAGGA |
| | | AAGTCGGCTCTGGCCCTGCCGCTAAGAGAGTGAAGCTG |
| | | GACtaatagTGAGCTGGAGCCTCGGTGGCCATGCTTCTTGC |
| | | CCCTTGGGCCTCCCCCCAGCCCCTCCTCCCCTTCCTGCA |
| | | CCCGTACCCCCGTGGTCTTTGAATAAAGTCTGAGTGGGC |
| | | GGCAATCAACCTCTGGATTACAAAATTTGTGAAAGATTG |
| | | ACTGATATTCTTAACTATGTTGCTCCTTTTACGCTGTGTG |
| | | GATATGCTGCTTTAATGCCTCTGTATCATGCTATTGCTTC |
| | | CCGTACGGCTTTCGTTTTCTCCTCCTTGTATAAATCCTGG |
| | | TTGCTGTCTCTTTATGAGGAGTTGTGGCCCGTTGTCCGTC |
| | | AACGTGGCGTGGTGTGCTCTGTGTTTGCTGACGCAACCC |
| | | CCACTGGCTGGGGCATTGCCACCACCTGTCAACTCCTTT |
| | | CTGGGACTTTCGCTTTCCCCCTCCCGATCGCCACGGCAG |
| | | AACTCATCGCCGCCTGCCTTGCCCGCTGCTGGACAGGGG |
| | | CTAGGTTGCTGGGCACTGATAATTCCGTGGTGTTGTCGG |
| | | GGAAGCTGACGTCCTTTCCAgGGCTGCTCGCCTGTGTTG |
| | | CCAACTGGATCCTGCGCGGGACGTCCTTCTGCTACGTCC |
| | | CTTCGGCTCTCAATCCAGCGGACCTCCCTTCCCGAGGCC |
| | | TTCTGCCGGTTCTGCGGCCTCTCCCGCGTCTTCGCTTTCG |
| | | GCCTCCGACGAGTCGGATCTCCCTTTGGGCCGCCTCCCC |
| | | GCCTGAAAAAAAAAAAAAAACAAAAAAAAAAAAAAAA |
| | | AAAAAAAAAAACCAAAAAAAAAAAAAAAAAAAAAAAA |
| | | AAAAAAAAAAACCCCAAAAAAAAAAAAAAAAAAAAAA |
| | | AAAAAAAAAAAAAAAAAAAAAAAA (SEQ ID NO: 1330) |

[0300] Next, the tagRNA scaffold (for binding of certain Cas9 proteins) was engineered to optimize the molecule for additional efficiency in editing. A representative scaffold structure is shown in FIG. 12, wherein certain portions of the scaffold are edited and/or replaced. The truncations tested are presented in the Table below. In this instance, SSACas9 was used. The truncated versions were tested in vitro and the data, as the average of triplicate runs, is presented below. It was observed that truncations of the scaffold increase precise editing of the RT editing system. Similar optimizations for other Cas9s, for instance, SpRYcCas9, are contemplated.

TABLE 23
SCAFFOLD VARIANTS

| | | | | % Precise |
|---|---|---|---|---|
| | SEQ | | | editing |
| Version | ID NO: | Description | Length | (T > C) |
| v0 | 755 | wild type | 123 | 0.27 |
| v1 | 756 | UA:AU to GC:CG | 123 | 23.02 |
| v2 | 757 | RAR trunc1 | 116 | 20.47 |
| v3 | 758 | RAR trunc2 + UUCG | 111 | 5.71 |
| v4 | 759 | UA:AU + RAR trunc1 | 116 | 0.05 |
| v5 | 760 | UA:AU + RAR trunc2 | 111 | 9.79 |
| v6 | 761 | SL2_trunc1 | 98 | 0.06 |
| v7 | 762 | SL2_trunc2 | 96 | 54.69 |
| v8 | 763 | SL2_trunc3 | 94 | 0.09 |
| v9 | 764 | SL2_trunc4 | 92 | 0.06 |
| v10 | 765 | SL2_trunc5 | 90 | 0.11 |
| v11 | 766 | UA:AU to GC:CG + SL2_trunc1 | 98 | 38.69 |
| v12 | 767 | RAR trunc1 + SL2_trunc1 | 91 | 0.19 |
| v13 | 768 | RAR trunc2 + UUCG + SL2_trunc1 | 86 | 12.80 |
| v14 | 769 | UA:AU + RAR trunc1 + SL2_trunc1 | 91 | 38.80 |
| v15 | 770 | UA:AU + RAR trunc2 + SL2_trunc1 | 86 | 3.46 |
| v16 | 771 | UA:AU to GC:CG + SL2_trunc2 | 96 | 69.12 |
| v17 | 772 | RAR trunc1 + SL2_trunc2 | 89 | 71.13 |
| v18 | 773 | RAR trunc2 + UUCG + SL2_trunc2 | 84 | 29.48 |
| v19 | 774 | UA:AU + RAR trunc1 + SL2_trunc2 | 89 | 60.29 |
| v20 | 775 | UA:AU + RAR trunc2 + SL2_trunc2 | 84 | 10.93 |
| v21 | 776 | UA:AU to GC:CG + SL2_trunc3 | 94 | 0.08 |
| v22 | 777 | RAR trunc1 + SL2_trunc3 | 87 | 0.06 |
| v23 | 778 | RAR trunc2 + UUCG + SL2_trunc3 | 82 | 4.02 |
| v24 | 779 | UA:AU + RAR trunc1 + SL2_trunc3 | 87 | 19.13 |
| v25 | 780 | UA:AU + RAR trunc2 + SL2_trunc3 | 82 | 1.88 |
| v26 | 781 | UA:AU to GC:CG + SL2_trunc4 | 92 | 1.00 |
| v27 | 782 | RAR trunc1 + SL2_trunc4 | 85 | 2.68 |
| v28 | 783 | RAR trunc2 + UUCG + SL2_trunc4 | 80 | 0.05 |
| v29 | 784 | UA:AU + RAR trunc1 + SL2_trunc4 | 85 | 0.09 |
| v30 | 785 | UA:AU + RAR trunc2 + SL2_trunc4 | 80 | 0.06 |
| v31 | 786 | UA:AU to GC:CG + SL2_trunc5 | 90 | 0.04 |
| v32 | 787 | RAR trunc1 + SL2_trunc5 | 83 | 0.11 |
| v33 | 788 | RAR trunc2 + UUCG + SL2_trunc5 | 78 | 0.03 |
| v34 | 789 | UA:AU + RAR trunc1 + SL2_trunc5 | 83 | 0.05 |
| v35 | 790 | UA:AU + RAR trunc2 + SL2_trunc5 | 78 | 0.04 |

### Example 4

### tagRNA Optimization

[0301] Provided in this example are optimizations of the tagRNA. Parameters for optimization included sequence (nucleotide) optimization (e.g., spacer length, FBS composition, homology length, and edits (silent mutations); (2) structure optimization (e.g., scaffold structure); and (3) chemical optimization (e.g., backbone chemical modifications to improve stability and/or potency). See FIGS. 13-15. Editing experiments were performed using methods as described above in Example 3 (except as otherwise noted) in Huh7 cells carrying the E342K mutation.

[0302] UA pairs in the tagRNA scaffold (See FIG. 15) were replaced with GC pairs within the hairpin structure to strengthen the repeat anti-repeat region (RAR). These tagRNA variants can, in some embodiments, result in increased precise editing of target sequence (e.g., E342K disease mutation in the SERPINA1) as shown in FIG. 16. In these experiments, 125 ng of mRNA encoding the RT editor and 0.04 pmol tagRNA was used. Among the positions tested included positions 13, 18, 21, 40, 50, and 52-53 relative to v17 tagRNA scaffold (SEQ ID NO: 700). In some cases, the U at position 13 is changed to a C, the A at position 18 is changed to a G, the A at position 21 is changed to a C or a U, the C at position 40 is changed to a U or an A or a G, the U at position 50 is changed to a C or an A or a G, the A at position 52 is changed to a C or a U or a G, the A at position 53 is changed to a C or a U or a G, and any combination of these changes. Table 24 provides exemplary sequences of tagRNA scaffold variants according to the present disclosure.

TABLE 24
SCAFFOLD VARIANTS

| | | SEQ ID |
|---|---|---|
| NAME | SEQUENCE¹ | NO: |
| v17_00 | GUUUUUGUACUCUGAAAAGAAGCUACAAAGAUAAGGCUUCAUGCCGAAAUCAA | 700 |
| v17_01 | GUUUUUGUACUCCGAAAGGAAGCUACAAAGAUAAGGCUUAAUGCCGAAAACAA | 964 |
| v17_02 | GUUUUUGUACUCCGAAAGGACGCUACAAAGAUAAGGCUUAAUGCCGAAAACAA | 965 |
| v17_03 | GUUUUUGUACUCCGAAAGGAUGCUACAAAGAUAAGGCUUAAUGCCGAAAACAA | 966 |
| v17_04 | GUUUUUGUACUCCGAAAGGAAGCUACAAAGAUAAGGCUUGAUGCCGAAAACAA | 967 |
| v17_05 | GUUUUUGUACUCCGAAAGGAAGCUACAAAGAUAAGGCUUUAUGCCGAAAACAA | 968 |
| v17_06 | GUUUUUGUACUCCGAAAGGAAGCUACAAAGAUAAGGCUUCAUGCCGAAAACAA | 969 |
| v17_07 | GUUUUUGUACUCCGAAAGGACGCUACAAAGAUAAGGCUUGAUGCCGAAAACAA | 970 |
| v17_08 | GUUUUUGUACUCCGAAAGGACGCUACAAAGAUAAGGCUUUAUGCCGAAAACAA | 971 |
| v17_09 | GUUUUUGUACUCCGAAAGGAUGCUACAAAGAUAAGGCUUGAUGCCGAAAACAA | 972 |
| v17_10 | GUUUUUGUACUCCGAAAGGAUGCUACAAAGAUAAGGCUUUAUGCCGAAAACAA | 973 |
| v17_11 | GUUUUUGUACUCCGAAAGGACGCUACAAAGAUAAGGCUUCAUGCCGAAAACAA | 974 |
| v17_12 | GUUUUUGUACUCCGAAAGGAUGCUACAAAGAUAAGGCUUCAUGCCGAAAACAA | 975 |
| v17_13 | GUUUUUGUACUCCGAAAGGAAGCUACAAAGAUAAGGCUUAAUGCCGAAAACAC | 976 |
| v17_14 | GUUUUUGUACUCCGAAAGGAAGCUACAAAGAUAAGGCUUAAUGCCGAAAACAG | 977 |
| v17_15 | GUUUUUGUACUCCGAAAGGAAGCUACAAAGAUAAGGCUUAAUGCCGAAAACAU | 978 |
| v17_16 | GUUUUUGUACUCCGAAAGGAAGCUACAAAGAUAAGGCUUAAUGCCGAAAACCA | 979 |
| v17_17 | GUUUUUGUACUCCGAAAGGAAGCUACAAAGAUAAGGCUUAAUGCCGAAAACGA | 980 |
| v17_18 | GUUUUUGUACUCCGAAAGGAAGCUACAAAGAUAAGGCUUAAUGCCGAAAACUA | 981 |
| v17_19 | GUUUUUGUACUCCGAAAGGAAGCUACAAAGAUAAGGCUUAAUGCCGAAACCAA | 982 |
| v17_20 | GUUUUUGUACUCCGAAAGGAAGCUACAAAGAUAAGGCUUAAUGCCGAAAGCAA | 983 |
| v17_21 | GUUUUUGUACUCCGAAAGGAAGCUACAAAGAUAAGGCUUAAUGCCGAAAUCAA | 984 |
| v17_22 | GUUUUUGUACUCCGAAAGGAAGCUACAAAGAUAAGGCUUCAUGCCGAAAUCAA | 985 |
| v17_23 | GUUUUUGUACUCCGAAAGGAAGCUACAAAGAUAAGGCUUCAUGCCGAAACCAA | 986 |
| v17_24 | GUUUUUGUACUCCGAAAGGAAGCUACAAAGAUAAGGCUUCAUGCCGAAAGCAA | 987 |
| v17_25 | GUUUUUGUACUCCGAAAGGAAGCUACAAAGAUAAGGCUUGAUGCCGAAAUCAA | 988 |
| V17_26 | GUUUUUGUACUCCGAAAGGAAGCUACAAAGAUAAGGCUUUAUGCCGAAAUCAA | 894 |
| V17_27 | GUUUUUGUACUCCGAAAGGAAGCUACAAAGAUAAGGCUUCAUGCCGAAAUCAC | 895 |
| v17_28 | GUUUUUGUACUCCGAAAGGAAGCUACAAAGAUAAGGCUUCAUGCCGAAAUCAG | 989 |
| V17_29 | GUUUUUGUACUCCGAAAGGAAGCUACAAAGAUAAGGCUUCAUGCCGAAAUCAU | 896 |
| v17_30 | GUUUUUGUACUCCGAAAGGACGCUACAAAGAUAAGGCUUAAUGCCGAAAACCC | 990 |
| v17_31 | GUUUUUGUACUCCGAAAGGACGCUACAAAGAUAAGGCUUAAUGCCGAAAACCG | 991 |
| v17_32 | GUUUUUGUACUCCGAAAGGACGCUACAAAGAUAAGGCUUAAUGCCGAAAACCU | 992 |
| v17_33 | GUUUUUGUACUCCGAAAGGACGCUACAAAGAUAAGGCUUAAUGCCGAAAACGC | 993 |
| v17_34 | GUUUUUGUACUCCGAAAGGACGCUACAAAGAUAAGGCUUAAUGCCGAAAACGG | 994 |
| v17_35 | GUUUUUGUACUCCGAAAGGACGCUACAAAGAUAAGGCUUAAUGCCGAAAACGU | 995 |
| v17_36 | GUUUUUGUACUCCGAAAGGACGCUACAAAGAUAAGGCUUAAUGCCGAAAACUC | 996 |
| v17_37 | GUUUUUGUACUCCGAAAGGACGCUACAAAGAUAAGGCUUAAUGCCGAAAACUG | 997 |
| v17_38 | GUUUUUGUACUCCGAAAGGACGCUACAAAGAUAAGGCUUAAUGCCGAAAACUU | 998 |
| v17_39 | GUUUUUGUACUCCGAAAGGAUGCUACAAAGAUAAGGCUUAAUGCCGAAAACCC | 999 |

¹For RNA, T is U; U are T in the sequence listing

[0303] The lengths of the editing template, FBS, and spacer were also optimized. As shown in FIGS. 17-18, the editing template and FBS lengths were optimized via screening. It was found that an optimal FBS length is 6 nucleotides, while an optimal editing template length is 6-9 nucleotides. In the experiments shown in FIGS. 17-18, 0.07 or 0.25 pmol (for FIGS. 18A-18B, respectively) or 1 pmol (for FIGS. 17A-17B) of tagRNA and 125 ng mRNA encoding an RT editor (e.g., SsaCas9) were introduced into target cells. As shown in FIG. 19, the length of the spacer was also optimized via screening. Spacer lengths of 18 to 25 nucleotides were tested. It was determined that a spacer length of 21-23 nucleotides is optimal in some embodiments. In these experiments, 0.07 pmol of tagRNA and 125 ng of mRNA encoding an RT editor was used.

[0304] In some embodiments, and without being bound by any particular theory, adding silent substitutions at or near the target site can also improve editing. RT editing can be highly dependent on mismatch repair (MMR), and strategies to evade/redirect MMR can include introducing a second nick (egRNA) and/or silent mutation(s). In some embodiments, silent mutations exploit the various biases of the MMR machinery (See Chen et al. Cell, 2021), and some mutations can be preferred over others. For example, bigger bulges (e.g., multiple mutations in a row) can perform better. Accordingly, in some embodiments, the editing template comprises one or more silent nucleotide edits (not altering the amino acid sequence of the protein encoded by the double stranded target DNA) compared to the region corresponding to the editing target in the double stranded target DNA. The one or more silent nucleotide edits can comprise a substitution of 2 to 5 contiguous nucleotides.

[0305] As provided in this example and described herein, chemical modifications to the tagRNA scaffold can, in some embodiments, enhance in vivo stability of the guide to prevent degradation before editing is able to occur. Chemical modifications adding nuclease stability without compromising activity were explored. Different scaffold modification patterns were tested and the results are shown in FIG. 20. In these experiments, 31.3 ng of mRNA encoding an RT editor (e.g., SsaCas9) and 15.6 ng tagRNA was used. The flap binding sequence (FBS) was 8 nt in length and the editing template was 8 nt in length. As shown in FIG. 20, the D1 scaffold modification pattern resulted in significant improvement in editing. The chemical modification can include 2′-O-methyl modification. The chemical modification pattern can comprise modifications at positions 5-9, 12-21, 29, 37-38, 40, 50, 52-53 of the tagRNA scaffold (e.g., relative to v17), and any combination of these modifications. Exemplary chemical modifications of the tagRNA scaffold are shown in Table 25 below (based on V17 variant scaffold described above).

TABLE 25
SCAFFOLD CHEMICAL MODIFICATIONS

| NAME | SEQUENCE¹ | SEQ ID NO: |
|---|---|---|
| D0 | GUUUUUGUACUCUGAAAAGAAGCUACAAAGAUAAGGCUUCAUGCCGAAA | 700 |
| (v17) | UCAA | |
| D1² | rGrUrUrUmUmUmGmUmArCrUmCmUmGmAmAmAmAmGmAmArGrCrUrArCrAr | 897 |
| | AmArGrArUrArArGrGmCmUrUmCrArUrGrCrCrGrArArAmU | |
| | rCmAmA | |
| D2² | rGrUrUrUmUmUmGmUmArCrUmCmUmGmAmAmAmAmGmAmArGrCrUrArCrAr | 898 |
| | ArArGrArUrArArGrGrCrUrUrCrArUrGrCrCrGrArArArUrCmAmA | |
| D3² | rGrUrUrUrUrUrGrUrArCrUmCmUmGmAmAmAmAmGrArArGrCrUrArCrArArArGr | 1000 |
| | ArUrArArGrGrCrUrUrCrArUrGrCrCrGrArArArUrCmAmA | |
| D4² | mGrUmUmUmUmUmGmUmArCrUmCmUmGmAmAmAmAmGmAmAmGmCmUm | 1001 |
| | AmCmArAmAmGmAmUrArArGmGmCmUrUmCrArUrGmCmCrGrArAmAmUrCm | |
| | AmA | |
| D5² | mGrUmUrUmUmUmGmUmArCrUmCmUmGmAmAmAmAmGmAmArGmCrUmAr | 1002 |
| | CmArAmArGmArUrArArGrGmCmUrUmCrArUrGrCrCrGrArArAmUrCmAmA | |
| D6² | mGrUmUrUmUmUmGmUmArCrUmCmUmGmAmAmAmAmGmAmAmGrCmUrA | 1003 |
| | mCrArArAmGrAmUrArArGrGmCmUrUmCrArUrGrCrCrGrArArAmUrCmAmA | |
| D7² | mGrUmUrUmUrUmGrUmArCrUmCmUmGmAmAmAmAmGmAmArGmCrUmArC | 1004 |
| | mArAmArGmArUrArArGrGmCmUrUmCrArUrGrCrCrGrArArAmUrCmAmA | |
| D8² | mGrUmUrUmUrUmGrUmArCrUmCmUmGmAmAmAmAmGmAmAmGrCmUrAmC | 1005 |
| | rArArAmGrAmUrArArGrGmCmUrUmCrArUrGrCrCrGrArArAmUrCmAmA | |
| D9² | rGrUrUrUmUrUmGrUmArCrUmCmUmGmAmAmAmAmGmAmArGmCrUmArCm | 1006 |
| | ArAmArGmArUrArArGrGmCmUrUmCrArUrGrCrCrGrArArAmUrCmAmA | |
| D10² | rGrUrUrUmUrUmGrUmArCrUmCmUmGmAmAmAmAmGmAmAmGrCmUrAmCr | 1007 |
| | ArArAmGrAmUrArArGrGmCmUrUmCrArUrGrCrCrGrArArAmUrCmAmA | |
| D11² | rGrUrUrUmUrUmGrUmArCrUmCmUmGmAmAmAmAmGrArArGrCrUrArCrArArA | 1008 |
| | rGrArUrArArGrGrCrUrUrCrArUrGrCrCrGrArArArUrCmAmA | |
| D12² | fGrUfUfUmUmUmGmUmArCrUmCmUmGmAmAmAmAmGmAmAfGfCrUfAfCfAr | 1009 |
| | AmAfGfAfUrArArGfGmCmUrUmCrAfUrGfCfCrGrArAfAmUrCmAmA | |
| D13² | fGrUfUfUmUmUmGmUmArCrUmCmUmGmAmAmAmAmGmAmAfGfCrUfAfCfAr | 1010 |
| | AfAfGfAfUrArArGfGfCfUrUfCrAfUrGfCfCrGrArAfAfUrCmAmA | |
| D14² | fGrUfUfUmUfUmGfUmArCrUmCmUmGmAmAmAmAmGfAmAfGmCrUfAmCfAr | 1011 |
| | AmAfGmAfUrArArGfGmCfUrUmCrAfUrGmCfCrGrArAfAmUrCmAmA | |
| D15² | rGfUrUrUmUmUmGmUmAfCfUmCmUmGmAmAmAmAmGmAmArGrCfUrArCrAf | 1012 |
| | AmArGrArUrArAfGrGmCmUrUmCfArUfGrCrCfGrArArAmUfCmAmA | |
| D16² | rGfUrUrUmUmUmGmUmAfCfUmCmUmGmAmAmAmAmGmAmArGrCfUrArCrAf | 1013 |
| | ArArGrArUrArAfGrGrCrUrUrCfArUfGrCrCfGrArArArUfCmAmA | |
| D17² | rGfUrUrUrUrUrGrUrAfCfUmCmUmGmAmAmAmAmGrArArGrCfUrArCrAfArArGr | 1014 |
| | ArUrArAfGrGrCrUrUrCfArUfGrCrCfGrArArArUfCmAmA | |

¹For RNA, T is U; U are T in the sequence listing
²For the sequences: *, phosphorothioate modification; mN, 2′O-methyl modification; rN, unmodified ribonucleotide; fN indicates internal (2′) Fluoro modification. N = A, C, T/U,G.

### Example 5

### Reverse Transcriptase Identification and Screening

[0306] Described in this Example is disclosure related to identification and optimization of improved reverse transcriptases derived from, e.g., birds and bats.

[0307] Shown in FIG. 21 is an exemplary phylogenetic tree of various RTs of the disclosure. FIG. 22-FIG. 23 display editing efficiencies in Huh7 cells or primary human hepatocytes for the indicated RT. For experiments shown in FIG. 22, the RT editor was provided at an amount of 100 or 5 ng mRNA as indicated. The tagRNA was provided in an amount of 100 ng, and the egRNA in an amount of 33 ng. Huh7 cells were transfected with Lipofectomine Messenger Max reagent and editing was assessed after 72 hrs. For experiments shown in FIG. 23, the RT editor was provided at an amount of 250 ng mRNA as indicated. The tagRNA was provided in an amount of 37.5 ng, and the egRNA in an amount of 12.5 ng. Primary human hepatocyte cells were transfected with Lipofectomine Messenger Max reagent and editing was assessed after 72 hrs. The SEQ ID NOs for reverse transcriptases that were tested are shown in Table 26 below. Sequences of the SEQ ID NOs referenced below can be found in Table 11 above. PG102, PG275, PG276, PG277, and PG278 in FIG. 21 are mRNAs encoding MMLV RT as a control.

TABLE 26
EXEMPLARY REVERSE TRANSCRIPTASES

| | | *SEQ |
|---|---|---|
| **Name | Origin | ID NO: |
| pPG273_MMLV_protneg_RT | | 1015 |
| PG270_Woolly_monkey_RT | | 1016 |
| PG273_Melospiza_RT | Bird | 141 |
| PG273_Melospiza_consensus_protneg_RT | Bird | 1017 |
| PG273_Melospiza_protneg_RT | Bird | 260 |
| PG273_McrA_protneg_RT | Bird | 257 |
| PG273_ZalA_protneg_RT | Bird | 319 |
| PG273_Avian_protneg_RT | Bird | 1018 |
| PG273_Eptisicus_nilsonii_RT | Bat | 252 |
| PG273_RTBatA_protneg_RT | Bat | 251 |
| PG273_Myotis_brandtii_protneg_RT | Bat | 255 |
| PG273_Myotis_brandtii_protneg_noWPRE_RT | Bat | 255 |
| PG273_Pipistrellus_kuhlii_protneg_RT | Bat | 267 |
| PG273_Eptisicus_nilsonii_protneg_RT | Bat | 315 |

*SEQ ID NO refers to the amino acid sequence of the RT
**PolyA nomenclature: pPG270/275, SegPolyA_1; pPG271/276, SegPolyA_2; pPG272/277, SegPoly A_3; pPG273/278, SegPolyA_4

[0308] A mutant screen was performed to optimize the reverse transcriptases. Twelve previously described MMLV-RT mutations were introduced in Melospiza and Myotis Brandtii RTs. Each RT was aligned to MMLV-RT and the analogous mutation was made. Sequences were cloned into IVT backbone (pPG277 segmented PolyA 3). Nucleic acids were midiprepped and mRNA was made from the midiprepped plasmids using IVT. Variants were tested in PHH cells (reduced mRNA dose, FIG. 26A-FIG. 26B) and Huh7 cells (reduced mRNA dose and reduced all RNA dose, FIG. 24A-FIG. 25B). In FIG. 24A, low mRNA dose, full dose tagRNA and egRNA, and a standard tagRNA was used. In FIG. 24B3, lower dose of all RNA components and tagRNA with improved chemical modifications was used. In FIG. 25A, low mRNA dose, full dose tagRNA and egRNA, and a standard tagRNA was used. In FIG. 25B3, lower dose of all RNA components and tagRNA with improved chemical modifications was used. PG102 and PG277 of FIG. 24A-FIG. 26B are mRNAs encoding MMLV RT as a control.

[0309] Tables 27A and 27B provide a full list of the mutants designed. For Table 27A, the M. brandtii (M. br.) sequence is SEQ TD NO: 255. For Table 27B3, the Melospiza sequence (Mge-prot-neg) is SEQ ID NO: 260.

TABLE 27A
MUTANT LIST (M. BRANDTII)

| | | | Current | | | | |
|---|---|---|---|---|---|---|---|
| Mut. in | Mut. in | AA in | AA in | Position in | Position in | | |
| MMLV | Species | MML VRT | Species | MML VRT | Species | New AA | Species |
| NA | NA | NA | NA | NA | NA | NA | Mbr WT |
| V101R | V98R | V | V | 101 | 98 | R | Mbr |
| N200C | N197C | N | N | 200 | 197 | C | Mbr |
| N200D | N197D | N | N | 200 | 197 | D | Mbr |
| N200G | N197G | N | N | 200 | 197 | G | Mbr |
| A208T | A205T | A | A | 208 | 205 | T | Mbr |
| G248C | S245C | G | S | 248 | 245 | C | Mbr |
| P330E | P327E | T | P | 330 | 327 | E | Mbr |
| P330Q | P327Q | T | P | 330 | 327 | Q | Mbr |
| L435K | V432K | L | V | 435 | 432 | K | Mbr |
| K445T | R442T | K | R | 445 | 442 | T | Mbr |
| A623F | A623F | A | A | 623 | 623 | F | Mbr |

TABLE 27B
MUTANT LIST (M. GEORGIANA)

| | | | Current | | | | |
|---|---|---|---|---|---|---|---|
| Mut. in | Mut. in | AA in | AA in | Position in | Position in | New | |
| MMLV | Species | MML VRT | Species | MML VRT | Species | AA | Species |
| NA | NA | NA | NA | NA | NA | NA | Mge WT |
| V101R | V106R | V | V | 101 | 106 | R | Mge-prot-neg |
| N200C | N204C | N | N | 200 | 204 | C | Mge-prot-neg |
| N200D | N204D | N | N | 200 | 204 | D | Mge-prot-neg |
| N200G | N204G | N | N | 200 | 204 | G | Mge-prot-neg |
| A208T | E212T | A | E | 208 | 212 | T | Mge-prot-neg |
| G248C | G252C | G | G | 248 | 252 | C | Mge-prot-neg |
| P330E | P334E | T | P | 330 | 334 | E | Mge-prot-neg |
| P330Q | P334Q | T | P | 330 | 334 | Q | Mge-prot-neg |
| L435K | L440K | L | L | 435 | 440 | K | Mge-prot-neg |
| K445T | E450T | K | E | 445 | 450 | T | Mge-prot-neg |
| A623F | A629F | A | A | 623 | 629 | F | Mge-prot-neg |

TABLE 27C
Exemplary gRNAs

| NAME | SEQUENCE^{1,2} | SEQ ID NO: |
|---|---|---|
| LM10 | mU*mU*mG*rGrUrGrArCrUrGrCrCrArCrGrCrCrCrArArGrUrUrUrUrArGrAmGmC | 1267 |
| | mUmAmGmAmAmAmUmAmGmCrArArGrUrUrArArArArUrArArGrGrCrUrArGrUr | |
| | CrCrGrUrUrArUrCmAmAmCmUmUmGmAmAmAmAmAmGmUmGmGmCmAmC | |
| | mCmGmAmGmUmCmGmGmUmGmCrArGrUrGrArArCrcrCrCrCrCrUrUrGrGrGrCr | |
| | GrUrGrGrCrArGmU*mU*mU*mU | |
| LM49 | mG*mG*mC*rCrArGrCrArGrUrGrArArCrCrCrCrCrCrUrGrUrUrUrUrArGrAmGmC | 1268 |
| | mUmAmGmAmAmAmUmAmGmCrArArGrUrUrArArArArUrArArGrGrCrUrArGrUr | |
| | CrCrGrUrUrArUrCmAmAmCmUmUmGmAmAmAmAmAmGmUmGmGmCmAmC | |
| | mCmGmAmGmUmCmGmGmUmGmCmU*mU*mU*mU | |

¹For RNA, T is U; U are T in the sequence listing
²For the sequences: *, phosphorothioate modification; mN, 2′O-methyl modification; rN, unmodified ribonucleotide. N = A, C, T/U, G.

[0310] FIG. 27 displays mutant fold change from wild-type RT in primary human hepatocytes. N197C (Mbr)/N204C (Mge) was the strongest mutant in both species (N200C in MMLV RT). V98R (Mbr)/V16R (Mge) was second best (V101R in MMVLV RT).

### Example 6

### UTR mRNA Variant Screens

[0311] Described in this example are screens of 5′UTR sequences in RT mRNAs to enhance RT editing. Shown in Table 28 below are the components of the vectors used for testing 5′ UTRs.

TABLE 28
UTR VECTOR COMPONENTS

| | pPG102 | pPG278 | Myotis_RT_ctrl | UTR variants |
|---|---|---|---|---|
| 5′UTR | Control (SEQ ID | Control (SEQ ID | Control (SEQ ID | Variable (See, |
| | NO: 193) | NO: 193) | NO: 193) | Table 29) |
| RT | MMLV | MMLV | Myotis | Myotis |
| WPRE | No | Yes (SEQ ID NO: | No | No |
| | | 189) | | |
| PolyA | 120A (SEQ ID | SegpolyA_4 (SEQ | Segpoly A_4 (SEQ | Segpoly A_4 (SEQ |
| | NO: 186) | ID NO: 185) | ID NO: 185) | ID NO: 185) |

[0312] Provided in Table 29 are the sequences of the 5′UTR variants tested.

TABLE 29
EXEMPLARY 5′ UTR VARIANTS

| | | | SEQ ID |
|---|---|---|---|
| NAME | SEQUENCE¹ | Length | NO: |
| Control UTR | AGGAAAUAAGAGAGAAAAGAAGAGUAAGAAGAAAUAUA | 47 | 193 |
| | AGAGCCACC | | |
| NCA7d | AGCAAAAAUCAAAAUCAAUCAUCAUCACAACAUCAACA | 70 | 910 |
| | AUCAAUCAUCAACACAUCAUCAAGACACCACC | | |
| NCA7d-50nt | AGCAUCACAACAUCAACAAUCAAUCAUCAACACAUCAUC | 50 | 911 |
| | AAGACACCACC | | |
| HBB | AGAUUUGCUUCUGACACAACUGUGUUCACUAGCAACCU | 50 | 912 |
| | CAAACAGACACC | | |
| RV-UML-m002 | AGGUCCGUUAUAUUAUUUAUCUUGCAGAUCAAACUUCA | 50 | 913 |
| | GAGAGGAGGGCC | | |
| RV-UML-m314 | AGGGAACAGUGGAGCACAAUAGUUGUCACAAACGCGUG | 50 | 914 |
| | ACCUGUACCUUA | | |
| RV-UML-m017 | AGAGAAAGAGUUUCGAGAAAGUUGCGAUACACACCGAC | 50 | 915 |
| | CUAAUCCGUGUC | | |
| RV-UML-m349 | AGACUGAGUAGCGUUGUCGAUUGCUGUUUUCAUAACCG | 50 | 916 |
| | UACCGAGCCUGC | | |
| RV-UML-m286 | AGUGGAGAGCGCAAUCCAGUUUCCUUAGCAAAGCAUAU | 50 | 917 |
| | CACCCUUCGGCU | | |
| RV-UML-m302 | AGUUAUUUGCGAUAAACAGUAGGGAGACAAUUGACCUG | 50 | 918 |
| | CACAGCGUGGCC | | |
| RV-UML-m318 | AGCCCUUACACGAAUUCUCGAAAAUCGUGCUUCAAGAA | 50 | 919 |
| | ACGUACAACGGC | | |
| RV-UML-m348 | AGCCUUCGCACAAUACUCGCGCGUCCUAAGCAAAAUCGG | 50 | 920 |
| | AACAAGUACUG | | |
| RV-UML-m025 | AGGCGAAGUCUUCGACUACCACUACCCUCGCCGUCGCGG | 50 | 921 |
| | UCUUUGCUGUC | | |
| RV-UML-m006 | AGGCCGAGUCAUUAUCAUACUUGGUUCAAUCUAUUGAA | 50 | 922 |
| | CGAAGUAUUGCU | | |
| RV-UML-m004 | AGGGACCAAGAGUUCGAUACCUCAUCGAACUGCGAGUC | 50 | 923 |
| | AUAAGCAGGGCC | | |
| RV-UML-m007 | AGGGAUUUACCGAGAAUCUAGUUACAGAACAACCUCUU | 50 | 924 |
| | CCUAAAAGGGCC | | |
| RV-UML-m290 | AGGUUGCACUUUACCCUCCCUUCCCGUGGGAACGCAUUG | 50 | 925 |
| | CGAAAAUCGCA | | |
| RV-UML-m038 | AGCCGGAACACGGUAUCUGUGCGUUCGUAAUCAGUACU | 50 | 926 |
| | AACUCUAUCCAG | | |
| RV-UML-m291 | AGUGGAGAUUCGGGAUCUGCAAAUCACCGAUAAAACAU | 50 | 927 |
| | CCCUUCGGGAGG | | |
| RV-UML-m091 | AGAACGCGAGUUCCUUCUUCACUGGUACCUCACACCCAA | 50 | 928 |
| | UAGCAAUUCCA | | |
| RV-UML-m280 | AGACGGUAGACAAGGAAUCGAAAGACUGCUCCUCACUG | 50 | 929 |
| | CUUACGUUUACC | | |
| RV-UML-m078 | AGGUGGUCUUCUUGUUGCUACAGGAACCCACGGACUUA | 50 | 930 |
| | UUCGAUAGCGAC | | |
| RV-UML-m354 | AGUGAGUCCCCGUCAACCGUAUCGGGAGGGCGAUCGAC | 50 | 931 |
| | AAUUCUCUACCA | | |
| RV-UML-m076 | AGUGCCGCAUUGUCUUCUUGUGUUCGCUUGCCGCCGACG | 50 | 932 |
| | AACAACUGGAA | | |
| RV-UML-m358 | AGAAGGUUCCGCGACGCUCCCGCCUUCUAUCCCCUUCUU | 50 | 933 |
| | UAAAGUCGCUG | | |

¹For RNA, T is U; U are T in the sequence listing

[0313] FIG. 28 displays results of the 5′UTR screen. RV-UML-m007 displayed the greatest improvement in editing efficiency. Table 30 below shows the components and full-length sequence of the RV-UML-m007 mRNA.

TABLE 30
RV-UML-M007 mRNA SEQUENCES

| | | ¹SEQ |
|---|---|---|
| | Length | ID NO: |
| 5′UTR | 50 | 924 |
| Start codon | 3 | |
| NLS | 54 | 934 |
| nCas9 | 4101 | 935 |
| Linker | 102 | 936 |
| RT | 2007 | 937 |
| NLS | 102 | 938 |
| Stop codon | 3 | |
| 3′UTR | 110 | 188 |
| PolyA | 130 | 185 |
| Full length | 6662 | 939 |

¹For RNA, T is U; U are T in the sequence listing

### Example 7

### In Vivo Studies

### Two In Vivo AA TD Studies

[0314] An AATD mouse model (Jackson Laboratory, 028842) was employed in two in vivo studies. FIGS. 29A-29B depicts non-limiting exemplary data related to editing results in Groups 1, 2, and 4 (FIG. 29A) and Group 3 (FIG. 29B) of a first in vivo proof of concept study performed in a humanized AATD mouse model. FIG. 30 depicts non-limiting exemplary data related to editing results in a second in vivo proof of concept study performed in a humanized AATD mouse model.

[0315] The payload of Groups 1 and 2 was the same for both (mRNA:pAM035, and guide: Ssa_s20_v17d1_F6E7_TtoC—sequences are in Tables 34-35 below).

[0316] mRNAs encoding ssaCas9 RT editor (pAM035) and tagRNA was mixed at a 1:1 w/w ratio in an aqueous buffer. The lipid mix composed of a cationic lipid, a helper lipid, a PEG-lipid and a cholesterol at optimized ratio of 47.5:10:40:2.5 (PJ-240709-01) and of 47.5:10:41:1.5 (PJ-240709-02) were mixed in ethanol (for Study 1). (For study 2 formulation was only 47.5:10:40:2.5). The total RNA in aqueous phase and the lipid in ethanol phase was mixed using a Precision Ignite system with 3:1 aqueous: ethanol ratio at 12 ml/min speed. The formulated LNP was diluted with PBS and dialyzed against PBS overnight.

[0317] A total RNA dose of 3 mg/kg (Study 1) or 0.5 mg/kg or 2 mg/kg (for Study 2), formulated of the LNPs was delivered intravenously to NSG-PiZ (Jackson Laboratory, 028842) mice carrying the E342K (PiZ) mutation. Seven days post-administration, the mice were sacrificed, and liver samples were collected for analysis. Genomic DNA was then extracted from the liver, and primers targeting the E342K locus were used to amplify this region. The resulting amplicons were analyzed via short-read sequencing using an Illumina MiSeq. Successful editing was indicated by the conversion of a T/A nucleotide to a C/G nucleotide.

TABLE 31
FIRST AATD STUDY

| | | | | IV | # of NSG- | |
|---|---|---|---|---|---|---|
| Group | LNP (ALC307) | Payload | Identifier | Dose | PiZZ | Readouts |
| 1 | PJ-240709-01 | SsaCas9-RT | 2.5% peg | 3 mpk | 5 | D7: liver |
| | (2.5% peg) | mRNA (pAM35) | (cntrl) | | | gDNA |
| 2 | PJ-240709-02 | Ssa_s20_v17d1 | 1.5% peg | 3 mpk | 5 | D7: liver |
| | (1.5% peg) | F6E7_TtoC | | | | gDNA |
| | | 1:1 ratio | | | | |
| 3 | PJ-240715-01 | SpyCas9-RT | mPCSK9 | 3 mpk | 5 | D7: liver |
| | (mPCSK9-2) | mRNA, mPCSK9-2 | | | | gDNA |
| | | sgRNA 1:1 ratio | | | | |
| 4 | — | | PBS | | 3 | D7: liver |
| | | | | | | gDNA |
| | | | | | 18 total mice | |

[0318] In the second in vivo study (RT editing in NSG-PiZ (SERPINA1-E342K) homozygous mice), modified mRNAs were employed. End-protected mRNA (InvdT) were tested. Unmodified mRNA vs. InvdT mRNA, pAM088 (no WPRE, MMLV-RT); control group (PBS); n=3 per cohort. tagRNA F6E7, in-house_s23, v17-d1_29, 1×fluoro FBS_1 (tagRNA showed ˜95% purity by 90 min analytical method). The study employed a dose of 0.5 mpk, 2 mpk; 2.5% PEG-lipid. Injection on Day 1 was followed by takedown on Day 8 (7 days post-injection), and sequence analysis was subsequently performed.

TABLE 32
SECOND AATD STUDY

| | | | | | | Concen- | Encapsu- |
|---|---|---|---|---|---|---|---|
| | | | | | Ratio | tration | lation |
| P | Size | PDI | mRNA | tagRNA | (m:m) | (ug/mL) | Efficiency |
| NVD 10 | 79.72 | 0.07917 | SsaCas9- | Ssa_s23_v17d1_29_1F1_OMe3_F6E7 | 1:1 | 483 | 96% |
| | | | RT with | | | | |
| | | | AG cap | | | | |
| NVD 11 | 78.54 | 0.01989 | SsaCas9- | Ssa_s23_v17d1_29_1F1_OMe3_F6E7 | 1:1 | 384 | 95% |
| | | | RT with | | | | |
| | | | AG cap, | | | | |
| | | | mod 1 | | | | |

### In Vivo PKU Study

[0319] An in vivo proof of concept study was performed in humanized PKU mice. A mouse model was generated wherein the mouse exon 12 was replaced with the human exon 12 as shown in FIG. 31. FIG. 32 depicts non-limiting exemplary data related to editing results in an in vivo proof of concept study performed in humanized PKU mice.

[0320] RT Editor mRNAs (pTPRT298, pTPRT493, and pPG278), tagRNA and an egRNA were mixed at a 1:1:0.3 w/w ratio in an aqueous buffer. The lipid mix composed of a cationic lipid, a helper lipid, a PEG-lipid and a cholesterol at optimized ratio of 47.5:10:41:1.5 PJ-240709-02 were mixed in ethanol. The total RNA in aqueous phase and the lipid in ethanol phase was mixed using a Precision Ignite system with 3:1 aqueous: ethanol ratio at 12 ml/min speed. The formulated LNP was diluted with PBS and dialyzed against PBS overnight.

[0321] A total RNA dose of 2 mg/kg, formulated of the above LNPs was delivered intravenously to humanized heterozygous PKU mice where the mouse Pah exon 12 was replaced with human PAH exon 12 carrying the R408W mutation. Seven days post-administration, the mice were sacrificed, and liver samples were collected for analysis. Genomic DNA was then extracted from the liver, and primers targeting the R408W locus were used to amplify this region.

The resulting amplicons were analyzed via short-read sequencing using an Illumina MiSeq. Successful editing was indicated by the conversion of a T nucleotide to a C nucleotide.

TABLE 33
PKU STUDY

| Reagent Name | Description |
|---|---|
| PKU-g007 tagRNA | NGG1 spacer with 2′-F and 2′-oMe |
| | mods in FBS + D34 scaffold mod |
| PKU-m001 mRNA | pTPRT-U-298: custom 5′UTR with STH |
| | and segmented poly A 4 |
| PKU-m003 mRNA | pTPRT-U-493: PAPAP-8 linker, WPRE with |
| | segmented poly A 4 |
| pPG278 mRNA | pPG102 with WPRE and segmented poly A 4 |

### Materials

TABLE 34A
mRNA AND PROTEIN SEQUENCES OF CONSTRUCTS

| | Protein Sequence | mRNA Sequence |
|---|---|---|
| Name | (SEQ ID NO:) | (SEQ ID NO:) |
| pAM035 | 1036 | 1037 |
| pAM088 | 1038 | 1039 |
| pTPRT-U-298 | 1040 | 1041 |
| pTPRT-U-493 (contains a | 1042 | 1043 |
| different linker) | | |
| pPG278 | 1044 | 1045 |

TABLE 34B
GUIDES

| Name | Sequence | Sequence with chemical modifications |
|---|---|---|
| PKU-g007 | UAGCGAACUGAGAAGGGCCAGU | mU*mA*mG*rCrGrArArCrUrGrArGrArArGrGrGrCrCrAr |
| (Fp15_D34_ | UUUAGAGCUAGAAAUAGCAAGU | GrUrUrUrUrArGrAmGmCmUmAmGmAmAmAmUmAm |
| NGG1_F10E12) | UAAAAUAAGGCUAGUCCGUUAU | GrCrArArGrUrUrArArArArUrArArGrGrCrUrArGrUrCrCr |
| | CAACUUGAAAAAGUGGCACCGA | GrUrUrArUrCrArAmCmUmUmGmAmArArAmArGrUrGr |
| | GUCGGUGCACAAUACCUCGGCCC | GrCrArCmCrGrArGrUrCrGrGrUrGmCrArCrArArUrArCr |
| | UUCUCAG (SEQ ID NO: 1046) | CrUrCrGrG/i2FC/rC/i2FC/rUmUmCmU*mC*mA*mG |
| | | (SEQ ID NO: 1047) |
| PKU | UUCACUCAAGCCUGUGGUUUGU | mU*mU*mC*rArCrUrCrArArGrCrCrUrGrUrGrGrUrUrUr |
| egRNA | UUUAGAGCUAGAAAUAGCAAGU | GrUrUrUrUrArGrAmGmCmUmAmGmAmAmAmUmAm |
| +37 | UAAAAUAAGGCUAGUCCGUUAU | GmCrArArGrUrUrArArArArUrArArGrGrCrUrArGrUrCrC |
| (PKU_NGG1_ | CAACUUGAAAAAGUGGCACCGA | rGrUrUrArUrCmAmAmCmUmUmGmAmAmAmAmAm |
| plus37_ | GUCGGUGCUUUU (SEQ ID NO: | GmUmGmGmCmAmCmCmGmAmGmUmCmGmGmUm |
| D00) | 1048) | GmCmU*mU*mU*mU (SEQ ID NO: 1049) |
| Ssa_s20_ | AAGGCUGUGCUGACCAUCGAGU | mA*mA*mG*rGrCrUrGrUrGrCrUrGrArCrCrArUrCrGrAr |
| v17d1_F6E7_ | UUUUGUACUCUGAAAAGAAGCU | GrUrUrUmUmUmGmUmArCrUmCmUmGmAmAmAmA |
| TtoC | ACAAAGAUAAGGCUUCAUGCCG | mGmAmArGrCrUrArCrArAmArGrArUrArArGrGmCmUr |
| | AAAUCAACUCGUCGAUGGUC | UmCrArUrGrCrCrGrArArAmUrCmAmArCrUrCrGrUrCr |
| | (SEQ ID NO: 1050) | GrArUrG*mG*mU*mC (SEQ ID NO: 1051) |
| Ssa_s23_ | CAUAAGGCUGUGCUGACCAUCG | mC*mA*mU*rArArGrGrCrUrGrUrGrCrUrGrArCrCrArUr |
| v17d1_29_ | AGUUUUUGUACUCCGAAAGGAA | CrGrArGrUrUrUmUmUmGmUmArCrUmCmCmGmAmA |
| 1F1_OMe3_ | GCUACAAAGAUAAGGCUUCAUG | mAmGmGmAmArGrCrUrArCrArAmArGrArUrArArGrG |
| F6E7 | CCGAAAUCAUCUCGUCGAUGGU | mCmUrUmCrArUrGrCrCrGrArArAmUrCmAmUrCrUrCr |
| | C (SEQ ID NO: 1052) | GrUrCrG/i2FA/rUmG*mG*mU*mC (SEQ ID NO: 1053) |

M = 2′OMe, r = ribose, /i2F/ = 2′fluoro

### Example 8

### Codon Optimization

[0322] RT editor in pAM053 was used to generate three new codon optimizations (pAM197, 198, 199, Table 35 below). These four sequences were made into mRNA and tested in primary human hepatocytes using the ATP7B surrogate mutation and the PAH surrogate mutation.

TABLE 35
RT EDITOR CODON OPTIMIZATION

| | SEQ |
|---|---|
| Name/Description | ID NO: |
| pAM053 | 1085 |
| pAM197 | 1086 |
| pAM198 | 1087 |
| pAM199 | 1088 |

[0323] The codon optimized sequence pAM198 outperformed the other three codon optimizations at both genomic targets (FIG. 33-FIG. 34).

### Example 9

### Accessory Domains

[0324] Provided in this Example are RT editors comprising accessory domains. Accessory domains can include stabilizing domains (e.g., stabilons) and/or single strand binding (SSB) proteins to enhance the potency and/or processivity of RT editing.

[0325] Accessory domains can enhance the potency and processivity of RT editing. RecA peptides have previously been shown to improve Cas9-based HDR. RecA peptides are known to promote homologous DNA pairing. Sto7d has been used to increase the processivity of various polymerases. It has been shown that Stabilon sequences can enhance the activity of BxB1 by increasing protein and mRNA stability. Peptide insertion strategies are shown in FIG. 35-FIG. 36. RecA and Sto7d binding protein insertions were tested and results are shown in FIG. 37. Nterm-RecA and Linker-RecA shows improvement in editing. Sto7d does not show improvement.

[0326] A Stabilion screen was performed in Huh7 cells, the results of which are shown in FIG. 38. No improvement was found compared to the control (FIG. 38). SEQ ID NOs of the various RT-editors comprising accessory domains are provided in Table 36.

TABLE 36A
EXEMPLARY STABILON SEQUENCES

| | Protein | mRNA |
|---|---|---|
| | Sequence | Sequence |
| Name | (SEQ ID NO) | (SEQ ID NO) |
| Control (pAM088) | 1038 | 1039 |
| Nterm-RecACP-Sto7d-K13L-10aa | 1276 | 1301 |
| NtermCP-Sto7d-K13LD36LD36L-10aa | 1277 | 1302 |
| Cterm-RecACP-Sto7d-K13LD36L | 1278 | 1303 |
| CtermCP-Sto7d-K13LD36L-10aa | 1279 | 1304 |
| Linker-RecACP-Sto7d-K13LD36L-33aa | 1280 | 1305 |
| Linker-Sto7d-K13LCP-RecA | 1281 | 1306 |
| CP-RecA-10aa | 1282 | 1307 |
| Linker_Sto7d-K13LD36LCP-RecA-33aa | 1283 | 1308 |
| Nterm-Sto7d-K13LD36L | 1284 | 1309 |
| CPNterm-RecA-10aa | 1285 | 1310 |
| CP-RecA-33aaCterm-Sto7d-K13LD36L | 1286 | 1311 |
| CP-Sto7d-K13L-10aaCterm-RecA | 1287 | 1312 |
| CPLinker-Sto7d-D36L-10aaK13LD36L | 1288 | 1313 |
| CP-Sto7d-K13LD36LLinker-RecA | 1289 | 1314 |
| CPLinker-Sto7d-K13LD36L- 10aaK13L | 1290 | 1315 |
| CPLinker-Sto7d-K13LD36L- 33aaD36L | 1291 | 1316 |
| NLS-STABILION1-SsaCas9-w/ trunc M-MLV (pSB077) | 1292 | 1317 |
| NLS-STABILION2-SsaCas9-w/ trunc M-MLV (pSB078) | 1293 | 1318 |
| NLS-STABILION3-SsaCas9-w/ trunc M-MLV (pSB079) | 1294 | 1319 |
| NLS-STABILION4-SsaCas9-w/ trunc M-MLV (pSB080) | 1295 | 1320 |
| NLS-STABILION5-SsaCas9-w/ trunc M-MLV (pSB081) | 1296 | 1321 |
| NLS-STABILION6-SsaCas9-w/ trunc M-MLV (pSB082) | 1297 | 1322 |
| NLS-STABILION7-SsaCas9-w/ trunc M-MLV (pSB083) | 1298 | 1323 |
| Control, pAM088-w/ Trunc M-MLV (pSB084) | 1299 | 1324 |
| pSB046 | 1300 | 1325 |

TABLE 36B
EXEMPLARY gRNA SEQUENCES

| NAME | SEQUENCE^{1,2} | SEQ ID NO: |
|---|---|---|
| Ssa_s22_29d1_ | rGrArUrArArGrGmCmUrUmCrArUrGrCrCrGrArArAmUrCmAmUrCrUrCr | 1269 |
| F6E7_1F_TtoC | mA*mU*mA*rArGrGrCrUrGrUrGrCrUrGrArCrCrArUrCrGrArGrUrUrUmU | |
| | mUmGmUmArCrUmCmCmGmAmAmAmGmGmAmArGrCrUrArCrArAmA | |
| | GrUrCrG/i2FA/rUrG*mG*mU*mC | |

¹For RNA, T is U; U are T in the sequence listing. For each entry, the spacer sequence is underlined and the extension arm is bold.
²For the sequences: * , phosphorothioate modification; mN, 2′O-methyl modification; rN, unmodified ribonucleotide; i2FN, Int Fluoro modification. N = A, C, T/U, G.

[0327] An in vivo study was performed. pSB083 is an N-term Stabilion fusion. pSB046 contains lead UTRs (5′CES1var4 and 3′ extended HBB UTRs). Data from in vivo screening of mRNAs is shown in FIG. 39. Very low Indels were observed at 1mpk dose.

[0328] The employment of constructs comprising Sso7d was tested in the context of, e.g., Wilson's disease. Sso7d is a 64aa DNA-binding protein from Saccharolobus solfataricus. Two mutations are thought to ablate the RNase activity of Sso7d: K12L (also referred to herein as mut1) and E35L (also referred to herein as mut2). “mut1/2” means both mutations were incorporated. Sto7d from Sulfolobus tokodaii is an orthologue of Sso7d. Sto7d was tested for AATD and Sso7d was tested for WD. In this experiment, nSpyCas9 was split into two parts between amino acids 1248 and 1249. The RT and the Sso7d were inserted between the two portions of Cas9 (FIG. 40). As shown in FIG. 41, fusion of Sso7d to RT editor can increase editing efficiency. Table 37 below displays SEQ ID NOs of exemplary Sso7d related sequences of the disclosure.

TABLE 37
EXEMPLARY SSO7D SEQUENCES

| | Protein |
|---|---|
| Name | Sequence |
| Sso7d_mut1/2 | 1205 |
| NLS-nCas9_1248-RT-NLS | 1206 |
| NLS-nCas9_1248-Sso7d_mut1-RT-NLS | 1207 |
| NLS-nCas9_1248-Sso7d_mut2-RT-NLS | 1208 |
| NLS-nCas9_1248-Sso7d_mut1/2-RT-NLS | 1209 |

### Example 10

### Wilson's Disease mRNA Screen

[0329] In this Example, mRNAs were screened for comparison of lead constructs containing different linkers, NLSs, UTRs, RTs, stabilizing elements, and/or polyA. Table 38A-Table 38B provides the sequences and design of mRNAs tested. Sequences of components listed below can be found, for example, in Table 1, Table 2A-Table 2C, Table 9A-Table 9C, Table 11, and Table 29.

TABLE 38A
RT EDITORS (PROTEIN SEQUENCES)

| Name | Nterm NLS | Cas9 | Linker | RT | Cterm NLS |
|---|---|---|---|---|---|
| pLM147 | SEQ ID NO: 5 | SpCas9 R221K | GS-NLS-GS_4-gs | Mbr_WT | SEQ ID NO: 11 + SEQ |
| | | N394K H840A | | | ID NO: 12 |
| pLM149 | SEQ ID NO: 5 | SpCas9 R221K | GS-NLS-GS_4-gs | Mbr_N197C* | SEQ ID NO: 11 + SEQ |
| | | N394K H840A | | | ID NO: 12 |
| pMR031 | SEQ ID NO: 5 | SpCas9 R221K | PAPAP-4-Ala | MMLV_truncated | SEQ ID NO: 11 + SEQ |
| | | N394K H840A | | | ID NO: 12 |
| pMR032 | SEQ ID NO: 5 | SpCas9 R221K | PAPAP-8-Ala | MMLV_truncated | SEQ ID NO: 11 + SEQ |
| | | N394K H840A | | | ID NO: 12 |
| pPG102 | SEQ ID NO: 5 | SpCas9 R221K | GS-NLS-GS_4-gs | MMLV (SEQ ID NO: | SEQ ID NO: 11 + SEQ |
| | | N394K H840A | | 8) | ID NO: 12 |
| pPG307 | SEQ ID NO: 5 | SpCas9 R221K | PAPAP-8-Ala | Mbr_WT | SEQ ID NO: 11 + SEQ |
| | | N394K H840A | | | ID NO: 12 |
| pTPRT- | SEQ ID NO: 5 | SpCas9 R221K | GS-NLS-GS_4-gs | MMLV (SEQ ID NO: | SEQ ID NO: 11 + SEQ |
| U-294 | | N394K H840A | | 8) | ID NO: 12 |
| PTPRT- | SEQ ID NO: 5 | SpCas9 R221K | GS-NLS-GS_4-gs | MMLV (SEQ ID NO: | SEQ ID NO: 11 + SEQ |
| U-298 | | N394K H840A | | 8) | ID NO: 12 |
| pTPRT- | SEQ ID NO: 5 | SpCas9 R221K | GS-NLS-GS_4-gs | MMLV (SEQ ID NO: | SEQ ID NO: 11 + SEQ |
| U-323 | | N394K H840A | | 8) | ID NO: 12 |
| PTPRT- | SEQ ID NO: 5 | SpCas9 R221K | GS-NLS-GS_4-gs | MMLV (SEQ ID NO: | SEQ ID NO: 11 + SEQ |
| U-331 | | N394K H840A | | 8) | ID NO: 12 |
| pTPRT- | SEQ ID NO: 5 | SpCas9 R221K | GS-NLS-GS_4-gs | MMLV (SEQ ID NO: | SEQ ID NO: 11 + SEQ |
| U-334 | | N394K H840A | | 8) | ID NO: 12 |
| pTPRT- | SEQ ID NO: 5 | SpCas9 R221K | GS-NLS-GS_4-gs | MMLV (SEQ ID NO: | SEQ ID NO: 11 + SEQ |
| U-375 | | N394K H840A | | 8) | ID NO: 12 |
| pTPRT- | SEQ ID NO: 5 | SpCas9 R221K | PAPAP-8-Ala | MMLV (SEQ ID NO: | SEQ ID NO: 11 + SEQ |
| U-493 | | N394K H840A | | (8) | ID NO: 12 |
| pTPRT- | SEQ ID NO: 5 | SpCas9 R221K | GS-NLS-GS 4-gs | MMLV (SEQ ID NO: | SEQ ID NO: 5 |
| U-504 | | N394K H840A | | 8) | |
| PTPRT- | SEQ ID NO: 5 | SpCas9 R221K | PAPAP-8-Ala | MMLV (SEQ ID NO: | SEQ ID NO: 5 |
| U-505 | | N394K H840A | | 8) | |
| pTPRT- | NLS of | SpCas9 R221K | GS-NLS-GS_4-gs | MMLV (SEQ ID NO: | NLS of SV40 + NLS of |
| U-516 | Nucleoplasmin | N394K H840A | | 8) | C-Myc |
| | + Hybrid NLS | | | | |
| PTPRT- | NLS of | SpCas9 R221K | PAPAP-8-Ala | MMLV (SEQ ID NO: | NLS of SV40 + NLS of |
| U-517 | Nucleoplasmin | N394K H840A | | 8) | C-Myc |
| | + Hybrid NLS | | | | |
| PTPRT- | Hybrid NLS + | SpCas9 R221K | GS-NLS-GS_4-gs | MMLV (SEQ ID NO: | NLS of SV40 + NLS of |
| U-520 | NLS of SV40 | N394K H840A | | 8) | C-Myc |
| pTPRT- | NLS of | SpCas9 R221K | PAPAP-8-Ala | MMLV (SEQ ID NO: | SEQ ID NO: 5 |
| U-525 | Nucleoplasmin | N394K H840A | | 8) | |
| | + Hybrid NLS | | | | |
| pTPRT- | VirD NLS | SpCas9 R221K | PAPAP-8-Ala | MMLV (SEQ ID NO: | SEQ ID NO: 11 + SEQ |
| U-529 | | N394K H840A | | 8) | ID NO: 12 |
| pTPRT- | SEQ ID NO: 5 | SpCas9 R221K | PAPAP-8-Ala | MMLV (SEQ ID NO: | SEQ ID NO: 11 + SEQ |
| U-540 | | N394K H840A | | 8) | ID NO: 12 |
| PTPRT- | SEQ ID NO: 5 | SpCas9 R221K | PAPAP-8-Ala | MMLV (SEQ ID NO: | SEQ ID NO: 11 + SEQ |
| U-543 | | N394K H840A | | 8) | ID NO: 12 |
| PVC254 | SEQ ID NO: 5 | SpCas9 R221K | PAPAP-8-Ala | Mbr_truncated | SEQ ID NO: 11 + SEQ |
| | | N394K H840A | | | ID NO: 12 |
| PVC267 | SEQ ID NO: 5 | SpCas9 R221K | PAPAP-4-Ala | Pipistrellus_ | SEQ ID NO: 11 + SEQ |
| | | N394K H840A | | truncated | ID NO: 12 |
| PVC268 | SEQ ID NO: 5 | SpCas9 R221K | PAPAP-8-Ala | Pipistrellus_ | SEQ ID NO: 11 + SEQ |
| | | N394K H840A | | truncated | ID NO: 12 |
| PVC271 | SEQ ID NO: 5 | SpCas9 R221K | GGS-AEAK- | Pipistrellus_ | SEQ ID NO: 11 + SEQ |
| | | N394K H840A | ALEA_mod1-gs | truncated | ID NO: 12 |
| PVC299 | SEQ ID NO: 5 | SpCas9 R221K | GS-NLS-GS_4-gs | Mbr_WT | SEQ ID NO: 11 + SEQ |
| | | N394K H840A | | | ID NO: 12 |
| PVC302 | SEQ ID NO: 5 | SpCas9 R221K | GS-NLS-GS_4-gs | Mbr_WT | SEQ ID NO: 11 + SEQ |
| | | N394K H840A | | | ID NO: 12 |
| PVC313 | SEQ ID NO: 5 | SpCas9 R221K | GS-NLS-GS 4-gs | Mbr_WT | SEQ ID NO: 11 + SEQ |
| | | N394K H840A | | | ID NO: 12 |
| PVC318 | SEQ ID NO: 5 | SpCas9 R221K | GS-NLS-GS_4-gs | Mbr_WT | SEQ ID NO: 11 + SEQ |
| | | N394K H840A | | | ID NO: 12 |
| PVC319 | SEQ ID NO: 5 | SpCas9 R221K | GS-NLS-GS_4-gs | Mbr_WT | SEQ ID NO: 11 + SEQ |
| | | N394K H840A | | | ID NO: 12 |

*Mbr_N197C is SEQ ID NO: 255 comprising an N197C substitution (See, also, Table 27A above)

TABLE 38B
EXEMPLARY MRNAS ENCODING RT EDITORS (NON-CODING)

| | | | Stabilizing | |
|---|---|---|---|---|
| Name | 5′ UTR | 3′UTR | Element | Poly A |
| pLM147 | Syn_5′UTR | hHBA | WPRE | Seg_PolyA_3 |
| pLM149 | Syn_5′UTR | hHBA | WPRE | Seg_PolyA_3 |
| pMR031 | Syn_5′UTR | hHBA | WPRE | Seg_PolyA_3 |
| pMR032 | Syn_5′UTR | hHBA | WPRE | Seg_PolyA_3 |
| pPG102 | Syn_5′UTR | mHBA | None | 120_PolyA |
| pPG307 | Syn_5′UTR | hHBA | WPRE | Seg_PolyA_3 |
| pTPRT-U-294 | Apt17_custom 5′UTR | hHBA | STH | Seg_PolyA_4 |
| pTPRT-U-298 | custom 5′UTR | hHBA | STH | Seg_PolyA_4 |
| pTPRT-U-323 | SAA1 5′UTR | hHBA | WPRE | Seg_PolyA_4 |
| pTPRT-U-331 | SERPINA1 5′UTR | hHBA | WPRE | Seg_PolyA_4 |
| pTPRT-U-334 | SERPINA1 5′UTR | hHBA | STH | Seg_PolyA_4 |
| pTPRT-U-375 | CES1 var2 | hHBA | WPRE | Seg_PolyA_4 |
| pTPRT-U-493 | Syn_5′UTR | hHBA | WPRE | Seg_PolyA_4 |
| pTPRT-U-504 | Syn_5′UTR | hHBA | WPRE | Seg_PolyA_4 |
| pTPRT-U-505 | Syn_5′UTR | hHBA | WPRE | Seg_PolyA_4 |
| pTPRT-U-516 | Syn_5′UTR | hHBA | WPRE | Seg_PolyA_4 |
| pTPRT-U-517 | Syn_5′UTR | hHBA | WPRE | Seg_PolyA_4 |
| pTPRT-U-520 | Syn_5′UTR | hHBA | WPRE | Seg_PolyA_4 |
| pTPRT-U-525 | Syn_5′UTR | hHBA | WPRE | Seg_PolyA_4 |
| pTPRT-U-529 | Syn_5′UTR | hHBA | WPRE | Seg_PolyA_4 |
| pTPRT-U-540 | custom 5′UTR | hHBA | STH | Seg_PolyA_4 |
| pTPRT-U-543 | ALB 5′UTR | hHBA | None | Seg_PolyA_4 |
| pVC254 | Syn_5′UTR | hHBA | None | Seg_PolyA_4 |
| pVC267 | Syn_5′UTR | hHBA | None | Seg_PolyA_4 |
| pVC268 | Syn_5′UTR | hHBA | None | Seg_PolyA_4 |
| pVC271 | Syn_5′UTR | hHBA | None | Seg_PolyA_4 |
| pVC299 | NCA7d | hHBA | None | Seg_PolyA_4 |
| pVC302 | m002 | hHBA | None | Seg_PolyA_4 |
| pVC313 | m007 | hHBA | None | Seg_PolyA_4 |
| pVC318 | m280 | hHBA | None | Seg_PolyA_4 |
| pVC319 | m078 | hHBA | None | Seg_PolyA_4 |

[0330] Editing data in primary human hepatocytes are shown for correction of ATP71B surrogate mutation in FIG. 42.

### Example 11

### Chemical Modifications

[0331] Described in this Example are additional chemical modifications of tagRNAs disclosed herein. The tagRNA modifications were tested for correction of ATP71B H1069Q mutation in Huh7 cells. Table 39A-Table 39C provide the chemically modified tagRNAs. In some of the RNA sequences listed below, a position may be modified as a deoxyribonucleotide. Such position are not preceded by an ‘r’ and, when appropriate, are annotated as “T”.

TABLE 39A
EXEMPLARY MODIFIED tagRNAS (ATP7B)

| NAME | SEQUENCE^{1,2} | SEQ ID NO: |
|---|---|---|
| ChemMod_Set2_1 | mU*mU*mG*rGrUrGrArCrUrGrCrCrArCrGrCrCrCrArArGrUrUrUrUrArGr | 1089 |
| | AmGmCmUmAmGmAmAmAmUmAmGmCrArArGrUrUrArArArArUrArAr | |
| | GrGrCrUrArGrUrCrCrGrUrUrArUrCmAmAmCmUmUmGmAmAmAmAmA | |
| | mGmUmGmGmCmAmCmCmGmAmGmUmCmGmGmUmGmCrG/i2FU/ | |
| | rGrA/i2FA/rCrA/i2FC/rCrC/i2FC/rUrU/i2FG/rGrG/i2FC/rGrU/i2FG/ | |
| | rGrCmU*mU*mU*mU | |
| ChemMod_Set2_2 | mU*mU*mG*rGrUrGrArCrUrGrCrCrArCrGrCrCrCrArArGrUrUrUrUrArGr | 1090 |
| | AmGmCmUmAmGmAmAmAmUmAmGmCrArArGrUrUrArArArArUrArAr | |
| | GrGrCrUrArGrUrCrCrGrUrUrArUrCmAmAmCmUmUmGmAmAmAmAmA | |
| | mGmUmGmGmCmAmCmCmGmAmGmUmCmGmGmUmGmCrGrUrGrA | |
| | rArCrArCrCrCrCrUrUrGrGrG/i2FC/rGrU/i2FG/rGrCmU*mU*mU*m | |
| | U | |
| ChemMod_Set2_3 | mU*mU*mG*rGrUrGrArCrUrGrCrCrArCrGrCrCrCrArArGrUrUrUrUrArGr | 1091 |
| | AmGmCmUmAmGmAmAmAmUmAmGmCrArArGrUrUrArArArArUrArAr | |
| | GrGrCrUrArGrUrCrCrGrUrUrArUrCmAmAmCmUmUmGmAmAmAmAmA | |
| | mGmUmGmGmCmAmCmCmGmAmGmUmCmGmGmUmGmCrG/i2FU/ | |
| | rGrA/i2FA/rCrA/i2FC/rCrC/i2FC/rUrU/i2FG/rGrGrCrGrUrGrGrCmU* | |
| | mU*mU*mU | |
| ChemMod_Set2_4 | mU*mU*mG*rGrUrGrArCrUrGrCrCrArCrGrCrCrCrArArGrUrUrUrUrArGr | 1092 |
| | AmGmCmUmAmGmAmAmAmUmAmGmCrArArGrUrUrArArArArUrArAr | |
| | GrGrCrUrArGrUrCrCrGrUrUrArUrCmAmAmCmUmUmGmAmAmAmAmA | |
| | mGmUmGmGmCmAmCmCmGmAmGmUmCmGmGmUmGmC/i2FG/ | |
| | rUrG/i2FA/rArC/i2FA/rCrC/i2FC/rCrU/i2FU/rGrG/i2FG/rCrG/i2FU/ | |
| | rGrG/i2FC/mU*mU*mU*mU | |
| ChemMod_Set2_5 | mU*mU*mG*rGrUrGrArCrUrGrCrCrArCrGrCrCrCrArArGrUrUrUrUrArGr | 1093 |
| | AmGmCmUmAmGmAmAmAmUmAmGmCrArArGrUrUrArArArArUrArAr | |
| | GrGrCrUrArGrUrCrCrGrUrUrArUrCmAmAmCmUmUmGmAmAmAmAmA | |
| | mGmUmGmGmCmAmCmCmGmAmGmUmCmGmGmUmGmCrGrUrGrA | |
| | rArCrArCrCrCrCrUrUrGrG/i2FG/rCrG/i2FU/rGrG/i2FC/mU*mU*mU | |
| | *mU | |
| ChemMod_Set2_6 | mU*mU*mG*rGrUrGrArCrUrGrCrCrArCrGrCrCrCrArArGrUrUrUrUrArGr | 1094 |
| | AmGmCmUmAmGmAmAmAmUmAmGmCrArArGrUrUrArArArArUrArAr | |
| | GrGrCrUrArGrUrCrCrGrUrUrArUrCmAmAmCmUmUmGmAmAmAmAmA | |
| | mGmUmGmGmCmAmCmCmGmAmGmUmCmGmGmUmGmC/i2FG/rUrG/ | |
| | i2FA/rArC/i2FA/rCrC/i2FC/rCrU/i2FU/rGrGrGrCrGrUrGrGrCmU* | |
| | mU*mU*mU | |
| ChemMod_Set2_7 | mU*mU*mG*rGrUrGrArCrUrGrCrCrArCrGrCrCrCrArArGrUrUrUrUrArGr | 1095 |
| | AmGmCmUmAmGmAmAmAmUmAmGmCrArArGrUrUrArArArArUrArAr | |
| | GrGrCrUrArGrUrCrCrGrUrUrArUrCmAmAmCmUmUmGmAmAmAmAmA | |
| | mGmUmGmGmCmAmCmCmGmAmGmUmCmGmGmUmGmCrGrU/i2FG/ | |
| | rArA/i2FC/rArC/i2FC/rCrC/i2FU/rUrGrGrG/i2FC/rGrU/i2FG/rGrCmU | |
| | *mU*mU*mU | |
| ChemMod_Set2_8 | mU*mU*mG*rGrUrGrArCrUrGrCrCrArCrGrCrCrCrArArGrUrUrUrUrArGr | 1096 |
| | AmGmCmUmAmGmAmAmAmUmAmGmCrArArGrUrUrArArArArUrArAr | |
| | GrGrCrUrArGrUrCrCrGrUrUrArUrCmAmAmCmUmUmGmAmAmAmAmA | |
| | mGmUmGmGmCmAmCmCmGmAmGmUmCmGmGmUmGmCrGrU/i2FG/ | |
| | rArA/i2FC/rArC/i2FC/rCrC/i2FU/rUrGrG/i2FG/rCrG/i2FU/rGrG/i2FC/ | |
| | mU*mU*mU*mU | |
| ChemMod_Set2_9 | mU*mU*mG*rGrUrGrArCrUrGrCrCrArCrGrCrCrCrArArGrUrUrUrUrArGr | 1097 |
| | AmGmCmUmAmGmAmAmAmUmAmGmCrArArGrUrUrArArArArUrArAr | |
| | GrGrCrUrArGrUrCrCrGrUrUrArUrCmAmAmCmUmUmGmAmAmAmAmA | |
| | mGmUmGmGmCmAmCmCmGmAmGmUmCmGmGmUmGmCrGrU/i2FG/ | |
| | rArA/i2FC/rArC/i2FC/rCrC/i2FU/rUrG/i2FG/mGrC/i2FG/mUrG/i2FG/ | |
| | mCmU*mU*mU*mU | |
| ChemMod_Set2_10 | mU*mU*mG*rGrUrGrArCrUrGrCrCrArCrGrCrCrCrArArGrUrUrUrUrArGr | 1098 |
| | AmGmCmUmAmGmAmAmAmUmAmGmCrArArGrUrUrArArArArUrArAr | |
| | GrGrCrUrArGrUrCrCrGrUrUrArUrCmAmAmCmUmUmGmAmAmAmAmA | |
| | mGmUmGmGmCmAmCmCmGmAmGmUmCmGmGmUmGmCrGrU/i2FG/ | |
| | rArA/i2FC/rArC/i2FC/rCrC/i2FU/rUrG/i2FG/rGmC/i2FG/rUmG/i2FG/ | |
| | rCmU*mU*mU*mU | |
| ChemMod_Set2_11 | mU*mU*mG*rGrUrGrArCrUrGrCrCrArCrGrCrCrCrArArGrUrUrUrUrArGr | 1099 |
| | AmGmCmUmAmGmAmAmAmUmAmGmCrArArGrUrUrArArArArUrArAr | |
| | GrGrCrUrArGrUrCrCrGrUrUrArUrCmAmAmCmUmUmGmAmAmAmAmA | |
| | mGmUmGmGmCmAmCmCmGmAmGmUmCmGmGmUmGmCrGrU/i2FG/ | |
| | rArA/i2FC/rArC/i2FC/rCrC/i2FU/rUrG/i2FG/mGmC/i2FG/mUmG/ | |
| | i2FG/mCmU*mU*mU*mU | |
| ChemMod_Set2_12 | mU*mU*mG*rGrUrGrArCrUrGrCrCrArCrGrCrCrCrArArGrUrUrUrUrArGr | 1100 |
| | AmGmCmUmAmGmAmAmAmUmAmGmCrArArGrUrUrArArArArUrArAr | |
| | GrGrCrUrArGrUrCrCrGrUrUrArUrCmAmAmCmUmUmGmAmAmAmAmA | |
| | mGmUmGmGmCmAmCmCmGmAmGmUmCmGmGmUmGmCrGrU/i2FG/ | |
| | rArA/i2FC/rArC/i2FC/rCrC/i2FU/rUrGrG/i2FG/rC/i2FG/rU/i2FG/rG/ | |
| | i2FC/mU*mU*mU*mU | |
| ChemMod_Set2_13 | mU*mU*mG*rGrUrGrArCrUrGrCrCrArCrGrCrCrCrArArGrUrUrUrUrArGr | 1101 |
| | AmGmCmUmAmGmAmAmAmUmAmGmCrArArGrUrUrArArArArUrArAr | |
| | GrGrCrUrArGrUrCrCrGrUrUrArUrCmAmAmCmUmUmGmAmAmAmAmA | |
| | mGmUmGmGmCmAmCmCmGmAmGmUmCmGmGmUmGmCrG/i2FU/ | |
| | rGrA/i2FA/rCrA/i2FC/rCrC/i2FC/rUrU/i2FG/rG/i2FG/rC/i2FG/rU/ | |
| | i2FG/rG/i2FC/mU*mU*mU*mU | |
| ChemMod_Set2_14 | mU*mU*mG*rGrUrGrArCrUrGrCrCrArCrGrCrCrCrArArGrUrUrUrUrArGr | 1102 |
| | AmGmCmUmAmGmAmAmAmUmAmGmCrArArGrUrUrArArArArUrArAr | |
| | GrGrCrUrArGrUrCrCrGrUrUrArUrCmAmAmCmUmUmGmAmAmAmAmA | |
| | mGmUmGmGmCmAmCmCmGmAmGmUmCmGmGmUmGmC/i2FG/ | |
| | rUrG/i2FA/rArC/i2FA/rCrC/i2FC/rCrU/i2FU/rGrG/i2FG/rC/i2FG/rU/ | |
| | i2FG/rG/i2FC/mU*mU*mU*mU | |
| ChemMod_Set2_15 | mU*mU*mG*rGrUrGrArCrUrGrCrCrArCrGrCrCrCrArArGrUrUrUrUrArGr | 1103 |
| | AmGmCmUmAmGmAmAmAmUmAmGmCrArArGrUrUrArArArArUrArAr | |
| | GrGrCrUrArGrUrCrCrGrUrUrArUrCmAmAmCmUmUmGmAmAmAmAmA | |
| | mGmUmGmGmCmAmCmCmGmAmGmUmCmGmGmUmGmCrGrUrGrA | |
| | rArCrArCrCrCrCrUrUrG/i2FG/rG/i2FC/rG/i2FU/rG/i2FG/rCmU*mU* | |
| | mU*mU | |
| ChemMod_Set2_16 | mU*mU*mG*rGrUrGrArCrUrGrCrCrArCrGrCrCrCrArArGrUrUrUrUrArGr | \|1104 |
| | AmGmCmUmAmGmAmAmAmUmAmGmCrArArGrUrUrArArArArUrArAr | |
| | GrGrCrUrArGrUrCrCrGrUrUrArUrCmAmAmCmUmUmGmAmAmAmAmA | |
| | mGmUmGmGmCmAmCmCmGmAmGmUmCmGmGmUmGmCrGrU/i2FG/ | |
| | rArA/i2FC/rArC/i2FC/rCrC/i2FU/rUrG/i2FG/rG/i2FC/rG/i2FU/rG/ | |
| | i2FG/rCmU*mU*mU*mU | |
| ChemMod_Set2_17 | mU*mU*mG*rGrUrGrArCrUrGrCrCrArCrGrCrCrCrArArGrUrUrUrUrArGr | 1105 |
| | AmGmCmUmAmGmAmAmAmUmAmGmCrArArGrUrUrArArArArUrArAr | |
| | GrGrCrUrArGrUrCrCrGrUrUrArUrCmAmAmCmUmUmGmAmAmAmAmA | |
| | mGmUmGmGmCmAmCmCmGmAmGmUmCmGmGmUmGmCrG/i2FU/ | |
| | rGrA/i2FA/rCrA/i2FC/rCrC/i2FC/rUrU/i2FG//i2FG/rG/i2FC/rG/i2FU/ | |
| | rG/i2FG/rCmU*mU*mU*mU | |
| ChemMod_Set2_18 | mU*mU*mG*rGrUrGrArCrUrGrCrCrArCrGrCrCrCrArArGrUrUrUrUrArGr | 1106 |
| | AmGmCmUmAmGmAmAmAmUmAmGmCrArArGrUrUrArArArArUrArAr | |
| | GrGrCrUrArGrUrCrCrGrUrUrArUrCmAmAmCmUmUmGmAmAmAmAmA | |
| | mGmUmGmGmCmAmCmCmGmAmGmUmCmGmGmUmGmC/i2FG/rUrG/ | |
| | i2FA/rArC/i2FA/rCrC/i2FC/rCrU/i2FU/rG/i2FG/rG/i2FC/rG/i2FU/rG/ | |
| | i2FG/rCmU*mU*mU*mU | |
| ChemMod_Set2_19 | mU*mU*mG*rGrUrGrArCrUrGrCrCrArCrGrCrCrCrArArGrUrUrUrUrArGr | \|1107 |
| | AmGmCmUmAmGmAmAmAmUmAmGmCrArArGrUrUrArArArArUrArAr | |
| | GrGrCrUrArGrUrCrCrGrUrUrArUrCmAmAmCmUmUmGmAmAmAmAmA | |
| | mGmUmGmGmCmAmCmCmGmAmGmUmCmGmGmUmGmCrGrU/i2FG/ | |
| | rArA/i2FC/rArC/i2FC/rCrC/i2FU/rUrGrGmGrCmGrUmGrGmCmU*m | |
| | U*mU*mU | |
| ChemMod_Set2_20 | mU*mU*mG*rGrUrGrArCrUrGrCrCrArCrGrCrCrCrArArGrUrUrUrUrArGr | 1108 |
| | AmGmCmUmAmGmAmAmAmUmAmGmCrArArGrUrUrArArArArUrArAr | |
| | GrGrCrUrArGrUrCrCrGrUrUrArUrCmAmAmCmUmUmGmAmAmAmAmA | |
| | mGmUmGmGmCmAmCmCmGmAmGmUmCmGmGmUmGmCrG/i2FU/ | |
| | rGrA/i2FA/rCrA/i2FC/rCrC/i2FC/rUrU/i2FG/rGmGrCmGrUmGrGmCm | |
| | U*mU*mU*mU | |
| ChemMod_Set2_21 | mU*mU*mG*rGrUrGrArCrUrGrCrCrArCrGrCrCrCrArArGrUrUrUrUrArGr | 1109 |
| | AmGmCmUmAmGmAmAmAmUmAmGmCrArArGrUrUrArArArArUrArAr | |
| | GrGrCrUrArGrUrCrCrGrUrUrArUrCmAmAmCmUmUmGmAmAmAmAmA | |
| | mGmUmGmGmCmAmCmCmGmAmGmUmCmGmGmUmGmC/i2FG/rUrG/ | |
| | i2FA/rArC/i2FA/rCrC/i2FC/rCrU/i2FU/rGrGmGrCmGrUmGrGmCm | |
| | U*mU*mU*mU | |
| ChemMod_Set2_22 | mU*mU*mG*rGrUrGrArCrUrGrCrCrArCrGrCrCrCrArArGrUrUrUrUrArGr | 1110 |
| | AmGmCmUmAmGmAmAmAmUmAmGmCrArArGrUrUrArArArArUrArAr | |
| | GrGrCrUrArGrUrCrCrGrUrUrArUrCmAmAmCmUmUmGmAmAmAmAmA | |
| | mGmUmGmGmCmAmCmCmGmAmGmUmCmGmGmUmGmCrGrUrGrA | |
| | rArCrArCrCrCrCrUrUrGmGrGmCrGmUrGmGrCmU*mU*mU*mU | |
| ChemMod_Set2_23 | mU*mU*mG*rGrUrGrArCrUrGrCrCrArCrGrCrCrCrArArGrUrUrUrUrArGr | 1111 |
| | AmGmCmUmAmGmAmAmAmUmAmGmCrArArGrUrUrArArArArUrArAr | |
| | GrGrCrUrArGrUrCrCrGrUrUrArUrCmAmAmCmUmUmGmAmAmAmAmA | |
| | mGmUmGmGmCmAmCmCmGmAmGmUmCmGmGmUmGmCrGrU/i2FG | |
| | /rArA/i2FC/rArC/i2FC/rCrC/i2FU/rUrGmGrGmCrGmUrGmGrCmU*m | |
| | U*mU*mU | |
| ChemMod_Set2_24 | mU*mU*mG*rGrUrGrArCrUrGrCrCrArCrGrCrCrCrArArGrUrUrUrUrArGr | 1112 |
| | AmGmCmUmAmGmAmAmAmUmAmGmCrArArGrUrUrArArArArUrArAr | |
| | GrGrCrUrArGrUrCrCrGrUrUrArUrCmAmAmCmUmUmGmAmAmAmAmA | |
| | mGmUmGmGmCmAmCmCmGmAmGmUmCmGmGmUmGmCrG/i2FU/ | |
| | rGrA/i2FA/rCrA/i2FC/rCrC/i2FC/rUrU/i2FG/mGrGmCrGmUrGmGrCm | |
| | U*mU*mU*mU | |
| ChemMod_Set2_25 | mU*mU*mG*rGrUrGrArCrUrGrCrCrArCrGrCrCrCrArArGrUrUrUrUrArGr | 1113 |
| | AmGmCmUmAmGmAmAmAmUmAmGmCrArArGrUrUrArArArArUrArAr | |
| | GrGrCrUrArGrUrCrCrGrUrUrArUrCmAmAmCmUmUmGmAmAmAmAmA | |
| | mGmUmGmGmCmAmCmCmGmAmGmUmCmGmGmUmGmC/i2FG/rUrG/ | |
| | i2FA/rArC/i2FA/rCrC/i2FC/rCrU/i2FU/rGmGrGmCrGmUrGmGrCm | |
| | U*mU*mU*mU | |
| ChemMod_Set2_26 | mU*mU*mG*rGrUrGrArCrUrGrCrCrArCrGrCrCrCrArArGrUrUrUrUrArGr | 1114 |
| | AmGmCmUmAmGmAmAmAmUmAmGmCrArArGrUrUrArArArArUrArAr | |
| | GrGrCrUrArGrUrCrCrGrUrUrArUrCmAmAmCmUmUmGmAmAmAmAmA | |
| | mGmUmGmGmCmAmCmCmGmAmGmUmCmGmGmUmGmCrGrUrG/i2 | |
| | FA/rArCrA/i2FC/rCrCrC/i2FU/rUrGrG/i2FG/rCrGrU/i2FG/rGrCmU*m | |
| | U*mU*mU | |
| ChemMod_Set2_27 | mU*mU*mG*rGrUrGrArCrUrGrCrCrArCrGrCrCrCrArArGrUrUrUrUrArGr | 1115 |
| | AmGmCmUmAmGmAmAmAmUmAmGmCrArArGrUrUrArArArArUrArAr | |
| | GrGrCrUrArGrUrCrCrGrUrUrArUrCmAmAmCmUmUmGmAmAmAmAmA | |
| | mGmUmGmGmCmAmCmCmGmAmGmUmCmGmGmUmGmCrGrUrGrA | |
| | rArCrArCrCrCrCrUrUrGrG/i2FG/rCrGrU/i2FG/rGrCmU*mU*mU*m | |
| | U | |
| ChemMod_Set2_28 | mU*mU*mG*rGrUrGrArCrUrGrCrCrArCrGrCrCrCrArArGrUrUrUrUrArGr | 1116 |
| | AmGmCmUmAmGmAmAmAmUmAmGmCrArArGrUrUrArArArArUrArAr | |
| | GrGrCrUrArGrUrCrCrGrUrUrArUrCmAmAmCmUmUmGmAmAmAmAmA | |
| | mGmUmGmGmCmAmCmCmGmAmGmUmCmGmGmUmGmCrGrUrG/i2 | |
| | FA/rArCrA/i2FC/rCrCrC/i2FU/rUrGrGrGrCrGrUrGrGrCmU*mU*mU | |
| | *mU | |
| ChemMod_Set2_29 | mU*mU*mG*rGrUrGrArCrUrGrCrCrArCrGrCrCrCrArArGrUrUrUrUrArGr | 1117 |
| | AmGmCmUmAmGmAmAmAmUmAmGmCrArArGrUrUrArArArArUrArAr | |
| | GrGrCrUrArGrUrCrCrGrUrUrArUrCmAmAmCmUmUmGmAmAmAmAmA | |
| | mGmUmGmGmCmAmCmCmGmAmGmUmCmGmGmUmGmCrGrUrGrA/ | |
| | i2FA/rCrArCrC/i2FC/rCrUrUrG/i2FG/rGrCrGrU/i2FG/rGrCmU*mU* | |
| | mU*mU | |
| ChemMod_Set2_30 | mU*mU*mG*rGrUrGrArCrUrGrCrCrArCrGrCrCrCrArArGrUrUrUrUrArGr | 1118 |
| | AmGmCmUmAmGmAmAmAmUmAmGmCrArArGrUrUrArArArArUrArAr | |
| | GrGrCrUrArGrUrCrCrGrUrUrArUrCmAmAmCmUmUmGmAmAmAmAmA | |
| | mGmUmGmGmCmAmCmCmGmAmGmUmCmGmGmUmGmCrGrUrGrA | |
| | rArCrArCrCrCrCrUrUrG/i2FG/rGrCrGrU/i2FG/rGrCmU*mU*mU*m | |
| | U | |
| ChemMod_Set2_31 | mU*mU*mG*rGrUrGrArCrUrGrCrCrArCrGrCrCrCrArArGrUrUrUrUrArGr | 1119 |
| | AmGmCmUmAmGmAmAmAmUmAmGmCrArArGrUrUrArArArArUrArAr | |
| | GrGrCrUrArGrUrCrCrGrUrUrArUrCmAmAmCmUmUmGmAmAmAmAmA | |
| | mGmUmGmGmCmAmCmCmGmAmGmUmCmGmGmUmGmCrGrUrGrA/ | |
| | i2FA/rCrArCrC/i2FC/rCrUrUrGrGrGrCrGrUrGrGrCmU*mU*mU*mU | |
| ChemMod_Set2_32 | rUrUrGrGrUrGrArCrUrGrCrCrArCrGrCrCrCrArArGrUrUrUrUrArGrArGrCr | 1120 |
| | UrArGrArArArUrArGrCrArArGrUrUrArArArArUrArArGrGrCrUrArGrUrCr | |
| | CrGrUrUrArUrCrArArCrUrUrGrArArArArArGrUrGrGrCrArCrCrGrArGrUr | |
| | CrGrGrUrGrCrGrUrGrArArCrArCrCrCrCrUrUrGrGrGrCrGrUrGrGr | |
| | CrUrUrUrU | |
| ChemMod_Set2_33 | mU*mU*mG*rGrUrGrArCrUrGrCrCrArCrGrCrCrCrArArGrUrUrUrUrArGr | 1121 |
| | ArGrCrUrArGrArArArUrArGrCrArArGrUrUrArArArArUrArArGrGrCrUrAr | |
| | GrUrCrCrGrUrUrArUrCrArArCrUrUrGrArArArArArGrUrGrGrCrArCrCrGr | |
| | ArGrUrCrGrGrUrGrCrGrUrGrArArCrArCrCrCrCrUrUrGrGrGrCrGrU | |
| | rGrGrCmU*mU*mU*mU | |
| ChemMod_Set2_34 | mU*mU*mG*rGrUrGrArCrUrGrCrCrArCrGrCrCrCrArArGrUrUrUrUrArGr | 1122 |
| | AmGmCmUmAmGmAmAmAmUmAmGmCrArArGrUrUrArArArArUrArAr | |
| | GrGrCrUrArGrUrCrCrGrUrUrArUrCmAmAmCmUmUmGmAmAmAmAmA | |
| | mGmUmGmGmCmAmCmCmGmAmGmUmCmGmGmUmGmCrGrU/i2FG/ | |
| | rArA/i2FC/rArC/i2FC/rCrC/i2FU/rUrG/i2FG/rGrC/i2FG/rUrG/i2FG/ | |
| | rCmU*rU*rU*rU | |
| ChemMod_Set2_35 | mU*mU*mG*rGrUrGrArCrUrGrCrCrArCrGrCrCrCrArArGrUrUrUrUrArGr | 1123 |
| | AmGmCmUmAmGmAmAmAmUmAmGmCrArArGrUrUrArArArArUrArAr | |
| | GrGrCrUrArGrUrCrCrGrUrUrArUrCmAmAmCmUmUmGmAmAmAmAmA | |
| | mGmUmGmGmCmAmCmCmGmAmGmUmCmGmGmUmGmCrGrU/i2FG/ | |
| | rArA/i2FC/rArC/i2FC/rCrC/i2FU/rUrG/i2FG/rGrC/i2FG/rUrG/i2FG/rC | |
| | mU*mU*rU*rU | |
| ChemMod_Set2_36 | mU*mU*mG*rGrUrGrArCrUrGrCrCrArCrGrCrCrCrArArGrUrUrUrUrArGr | 1124 |
| | AmGmCmUmAmGmAmAmAmUmAmGmCrArArGrUrUrArArArArUrArAr | |
| | GrGrCrUrArGrUrCrCrGrUrUrArUrCmAmAmCmUmUmGmAmAmAmAmA | |
| | mGmUmGmGmCmAmCmCmGmAmGmUmCmGmGmUmGmCrGrU/i2FG | |
| | /rArA/i2FC/rArC/i2FC/rCrC/i2FU/rUrG/i2FG/rGrC/i2FG/rUrG/i2FG/rC | |
| | mU*mU*mU*rU | |
| ChemMod_Set2_37 | mU*mU*mG*rGrUrGrArCrUrGrCrCrArCrGrCrCrCrArArGrUrUrUrUrArGr | 1125 |
| | AmGmCmUmAmGmAmAmAmUmAmGmCrArArGrUrUrArArArArUrArAr | |
| | GrGrCrUrArGrUrCrCrGrUrUrArUrCmAmAmCmUmUmGmAmAmAmAmA | |
| | mGmUmGmGmCmAmCmCmGmAmGmUmCmGmGmUmGmCrGrU/i2FG | |
| | /rArA/i2FC/rArC/i2FC/rCrC/i2FU/rUrG/i2FG/rGrC/i2FG/rUrG/i2FG/rC | |
| | mU*mU*mU | |
| ChemMod_Set2_38 | mU*mU*mG*rGrUrGrArCrUrGrCrCrArCrGrCrCrCrArArGrUrUrUrUrArGr | 1126 |
| | AmGmCmUmAmGmAmAmAmUmAmGmCrArArGrUrUrArArArArUrArAr | |
| | GrGrCrUrArGrUrCrCrGrUrUrArUrCmAmAmCmUmUmGmAmAmAmAmA | |
| | mGmUmGmGmCmAmCmCmGmAmGmUmCmGmGmUmGmCrGrU/i2FG | |
| | /rArA/i2FC/rArC/i2FC/rCrC/i2FU/rUrG/i2FG/rGrC/i2FG/rUrG/i2FG/rC | |
| | rUrU*mU*mU*mUrU | |
| ChemMod_Set2_39 | mU*mU*mG*rGrUrGrArCrUrGrCrCrArCrGrCrCrCrArArGrUrUrUrUrArGr | 1127 |
| | AmGmCmUmAmGmAmAmAmUmAmGmCrArArGrUrUrArArArArUrArAr | |
| | GrGrCrUrArGrUrCrCrGrUrUrArUrCmAmAmCmUmUmGmAmAmAmAmA | |
| | mGmUmGmGmCmAmCmCmGmAmGmUmCmGmGmUmGmCrGrU/i2FG | |
| | /rArA/i2FC/rArC/i2FC/rCrC/i2FU/rUrG/i2FG/rGrC/i2FG/rUrG/i2FG/rC | |
| | rUrUmU*mU*mU*rU | |
| ChemMod_Set2_40 | mU*mU*mG*rGrUrGrArCrUrGrCrCrArCrGrCrCrCrArArGrUrUrUrUrArGr | 1128 |
| | AmGmCmUmAmGmAmAmAmUmAmGmCrArArGrUrUrArArArArUrArAr | |
| | GrGrCrUrArGrUrCrCrGrUrUrArUrCmAmAmCmUmUmGmAmAmAmAmA | |
| | mGmUmGmGmCmAmCmCmGmAmGmUmCmGmGmUmGmCrGrU/i2FG | |
| | /rArA/i2FC/rArC/i2FC/rCrC/i2FU/rUrG/i2FG/rGrC/i2FG/rUrG/i2FG/rC | |
| | rUmU*mU*mU*rUrU | |
| ChemMod_Set2_41 | mU*mU*mG*rGrUrGrArCrUrGrCrCrArCrGrCrCrCrArArGrUrUrUrUrArGr | 1129 |
| | AmGmCmUmAmGmAmAmAmUmAmGmCrArArGrUrUrArArArArUrArAr | |
| | GrGrCrUrArGrUrCrCrGrUrUrArUrCmAmAmCmUmUmGmAmAmAmAmA | |
| | mGmUmGmGmCmAmCmCmGmAmGmUmCmGmGmUmGmCrGrU/i2FG/ | |
| | rArA/i2FC/rArC/i2FC/rCrC/i2FU/rUrG/i2FG/rGrC/i2FG/rUrG/i2FG/rC | |
| | mU*mU*mU*rUrUrU | |
| ChemMod_Set2_42 | mU*mU*mG*rGrUrGrArCrUrGrCrCrArCrGrCrCrCrArArGrUrUrUrUrArGr | 1130 |
| | AmGmCmUmAmGmAmAmAmUmAmGmCrArArGrUrUrArArArArUrArAr | |
| | GrGrCrUrArGrUrCrCrGrUrUrArUrCmAmAmCmUmUmGmAmAmAmAmA | |
| | mGmUmGmGmCmAmCmCmGmAmGmUmCmGmGmUmGmCrGrU/i2FG | |
| | /rArA/i2FC/rArC/i2FC/rCrC/i2FU/rUrG/i2FG/rGrC/i2FG/rUrG/i2FG/rC | |
| | rU*rU*U*mU | |

¹For RNA, U are T in the sequence listing. For each entry, the spacer sequence is underlined and the extension arm is bold.
²For the sequences: *, phosphorothioate modification; mN, 2′O-methyl modification; rN, unmodified ribonucleotide; i2FN, Int Fluoro modification. A position lacking, e.g., r or m (or positions noted as T) are DNA positions within the RNA. N = A, C, T/U, G.

TABLE 39B
EXEMPLARY MODIFIED tagRNAS (ATP7B)

| NAME | SEQUENCE^{1,2} | SEQ ID NO: |
|---|---|---|
| ChemMod_Set3_1 | mU*mU*mG*rGrUrGrArCrUrGrCrCrArCrGrCrCrCrArArGrUrUrUrUrArGr | 1131 |
| | AmGmCmUmAmGmAmAmAmUmAmGmCrArArGrUrUrArArArArUrArAr | |
| | GrGrCrUrArGrUrCrCrGrUrUrArUrCmAmAmCmUmUmGmAmAmAmAmA | |
| | mGmUmGmGmCmAmCmCmGmAmGmUmCmGmGmUmGmCrGrUrGrA | |
| | rArCrArCrCrCrCrUrUrGrGrGrCrGrUrGrG/i2FC/mU*mU*mU*mU | |
| ChemMod_Set3_2 | mU*mU*mG*rGrUrGrArCrUrGrCrCrArCrGrCrCrCrArArGrUrUrUrUrArGr | 1132 |
| | AmGmCmUmAmGmAmAmAmUmAmGmCrArArGrUrUrArArArArUrArAr | |
| | GrGrCrUrArGrUrCrCrGrUrUrArUrCmAmAmCmUmUmGmAmAmAmAmA | |
| | mGmUmGmGmCmAmCmCmGmAmGmUmCmGmGmUmGmCrGrUrGrA | |
| | rArCrArCrCrCrCrUrUrGrGrGrCrGrUrG/i2FG/rCmU*mU*mU*mU | |
| ChemMod_Set3_3 | mU*mU*mG*rGrUrGrArCrUrGrCrCrArCrGrCrCrCrArArGrUrUrUrUrArGr | 1133 |
| | AmGmCmUmAmGmAmAmAmUmAmGmCrArArGrUrUrArArArArUrArAr | |
| | GrGrCrUrArGrUrCrCrGrUrUrArUrCmAmAmCmUmUmGmAmAmAmAmA | |
| | mGmUmGmGmCmAmCmCmGmAmGmUmCmGmGmUmGmCrGrUrGrA | |
| | rArCrArCrCrCrCrUrUrGrGrGrCrGrU/i2FG/rGrCmU*mU*mU*mU | |
| ChemMod_Set3_4 | mU*mU*mG*rGrUrGrArCrUrGrCrCrArCrGrCrCrCrArArGrUrUrUrUrArGr | 1134 |
| | AmGmCmUmAmGmAmAmAmUmAmGmCrArArGrUrUrArArArArUrArAr | |
| | GrGrCrUrArGrUrCrCrGrUrUrArUrCmAmAmCmUmUmGmAmAmAmAmA | |
| | mGmUmGmGmCmAmCmCmGmAmGmUmCmGmGmUmGmCrGrUrGrA | |
| | rArCrArCrCrCrCrUrUrGrGrGrCrG/i2FU/rGrGrCmU*mU*mU*mU | |
| ChemMod_Set3_5 | mU*mU*mG*rGrUrGrArCrUrGrCrCrArCrGrCrCrCrArArGrUrUrUrUrArGr | 1135 |
| | AmGmCmUmAmGmAmAmAmUmAmGmCrArArGrUrUrArArArArUrArAr | |
| | GrGrCrUrArGrUrCrCrGrUrUrArUrCmAmAmCmUmUmGmAmAmAmAmA | |
| | mGmUmGmGmCmAmCmCmGmAmGmUmCmGmGmUmGmCrGrUrGrA | |
| | rArCrArCrCrCrCrUrUrGrGrGrC/i2FG/rUrGrGrCmU*mU*mU*mU | |
| ChemMod_Set3_6 | mU*mU*mG*rGrUrGrArCrUrGrCrCrArCrGrCrCrCrArArGrUrUrUrUrArGr | 1136 |
| | AmGmCmUmAmGmAmAmAmUmAmGmCrArArGrUrUrArArArArUrArAr | |
| | GrGrCrUrArGrUrCrCrGrUrUrArUrCmAmAmCmUmUmGmAmAmAmAmA | |
| | mGmUmGmGmCmAmCmCmGmAmGmUmCmGmGmUmGmCrGrUrGrA | |
| | rArCrArCrCrCrCrUrUrGrGrG/i2FC/rGrUrGrGrCmU*mU*mU*mU | |
| ChemMod_Set3_7 | mU*mU*mG*rGrUrGrArCrUrGrCrCrArCrGrCrCrCrArArGrUrUrUrUrArGr | 1137 |
| | AmGmCmUmAmGmAmAmAmUmAmGmCrArArGrUrUrArArArArUrArAr | |
| | GrGrCrUrArGrUrCrCrGrUrUrArUrCmAmAmCmUmUmGmAmAmAmAmA | |
| | mGmUmGmGmCmAmCmCmGmAmGmUmCmGmGmUmGmCrGrUrGrA | |
| | rArCrArCrCrCrCrUrUrGrG/i2FG/rCrGrUrGrGrCmU*mU*mU*mU | |
| ChemMod_Set3_8 | mU*mU*mG*rGrUrGrArCrUrGrCrCrArCrGrCrCrCrArArGrUrUrUrUrArGr | 1138 |
| | AmGmCmUmAmGmAmAmAmUmAmGmCrArArGrUrUrArArArArUrArAr | |
| | GrGrCrUrArGrUrCrCrGrUrUrArUrCmAmAmCmUmUmGmAmAmAmAmA | |
| | mGmUmGmGmCmAmCmCmGmAmGmUmCmGmGmUmGmCrGrUrGrA | |
| | rArCrArCrCrCrCrUrUrG/i2FG/rGrCrGrUrGrGrCmU*mU*mU*mU | |
| ChemMod_Set3_9 | mU*mU*mG*rGrUrGrArCrUrGrCrCrArCrGrCrCrCrArArGrUrUrUrUrArGr | 1139 |
| | AmGmCmUmAmGmAmAmAmUmAmGmCrArArGrUrUrArArArArUrArAr | |
| | GrGrCrUrArGrUrCrCrGrUrUrArUrCmAmAmCmUmUmGmAmAmAmAmA | |
| | mGmUmGmGmCmAmCmCmGmAmGmUmCmGmGmUmGmCrGrUrGrA | |
| | rArCrArCrCrCrCrUrU/i2FG/rGrGrCrGrUrGrGrCmU*mU*mU*mU | |
| ChemMod_Set3_10 | mU*mU*mG*rGrUrGrArCrUrGrCrCrArCrGrCrCrCrArArGrUrUrUrUrArGr | 1140 |
| | AmGmCmUmAmGmAmAmAmUmAmGmCrArArGrUrUrArArArArUrArAr | |
| | GrGrCrUrArGrUrCrCrGrUrUrArUrCmAmAmCmUmUmGmAmAmAmAmA | |
| | mGmUmGmGmCmAmCmCmGmAmGmUmCmGmGmUmGmCrGrUrGrA | |
| | rArCrArCrCrCrCrUrU/i2FG//i2FG//i2FG/rCrGrUrGrGrCmU*mU*mU | |
| | *mU | |
| ChemMod_Set3_11 | mU*mU*mG*rGrUrGrArCrUrGrCrCrArCrGrCrCrCrArArGrUrUrUrUrArGr | 1141 |
| | AmGmCmUmAmGmAmAmAmUmAmGmCrArArGrUrUrArArArArUrArAr | |
| | GrGrCrUrArGrUrCrCrGrUrUrArUrCmAmAmCmUmUmGmAmAmAmAmA | |
| | mGmUmGmGmCmAmCmCmGmAmGmUmCmGmGmUmGmCrGrUrGrA | |
| | rArCrArCrCrCrCrUrU/i2FG//i2FG/rGrCrGrUrGrGrCmU*mU*mU*m | |
| | U | |
| ChemMod_Set3_12 | mU*mU*mG*rGrUrGrArCrUrGrCrCrArCrGrCrCrCrArArGrUrUrUrUrArGr | 1142 |
| | AmGmCmUmAmGmAmAmAmUmAmGmCrArArGrUrUrArArArArUrArAr | |
| | GrGrCrUrArGrUrCrCrGrUrUrArUrCmAmAmCmUmUmGmAmAmAmAmA | |
| | mGmUmGmGmCmAmCmCmGmAmGmUmCmGmGmUmGmCrGrUrGrA | |
| | rArCrArCrCrCrCrUrU/i2FG/rG/i2FG/rCrGrUrGrGrCmU*mU*mU*m | |
| | U | |
| ChemMod_Set3_13 | mU*mU*mG*rGrUrGrArCrUrGrCrCrArCrGrCrCrCrArArGrUrUrUrUrArGr | 1143 |
| | AmGmCmUmAmGmAmAmAmUmAmGmCrArArGrUrUrArArArArUrArAr | |
| | GrGrCrUrArGrUrCrCrGrUrUrArUrCmAmAmCmUmUmGmAmAmAmAmA | |
| | mGmUmGmGmCmAmCmCmGmAmGmUmCmGmGmUmGmCrGrUrGrA | |
| | rArCrArCrCrCrCrUrUrG/i2FG//i2FG/rCrGrUrGrGrCmU*mU*mU*m | |
| | U | |
| ChemMod_Set3_14 | mU*mU*mG*rGrUrGrArCrUrGrCrCrArCrGrCrCrCrArArGrUrUrUrUrArGr | 1144 |
| | AmGmCmUmAmGmAmAmAmUmAmGmCrArArGrUrUrArArArArUrArAr | |
| | GrGrCrUrArGrUrCrCrGrUrUrArUrCmAmAmCmUmUmGmAmAmAmAmA | |
| | mGmUmGmGmCmAmCmCmGmAmGmUmCmGmGmUmGmCrGrUrGrA | |
| | rArCrArCrCrCrCrUrU/i2FG//i2FG//i2FG/rC/i2FG/rU/i2FG//i2FG/rCm | |
| | U*mU*mU*mU | |
| ChemMod_Set3_15 | mU*mU*mG*rGrUrGrArCrUrGrCrCrArCrGrCrCrCrArArGrUrUrUrUrArGr | 1145 |
| | AmGmCmUmAmGmAmAmAmUmAmGmCrArArGrUrUrArArArArUrArAr | |
| | GrGrCrUrArGrUrCrCrGrUrUrArUrCmAmAmCmUmUmGmAmAmAmAmA | |
| | mGmUmGmGmCmAmCmCmGmAmGmUmCmGmGmUmGmCrGrUrGrA | |
| | rArCrArCrCrCrCrUrUrG/i2FG//i2FG/rC/i2FG/rU/i2FG//i2FG/rCmU*m | |
| | U*mU*mU | |
| ChemMod_Set3_16 | mU*mU*mG*rGrUrGrArCrUrGrCrCrArCrGrCrCrCrArArGrUrUrUrUrArGr | 1146 |
| | AmGmCmUmAmGmAmAmAmUmAmGmCrArArGrUrUrArArArArUrArAr | |
| | GrGrCrUrArGrUrCrCrGrUrUrArUrCmAmAmCmUmUmGmAmAmAmAmA | |
| | mGmUmGmGmCmAmCmCmGmAmGmUmCmGmGmUmGmCrGrUrGrA | |
| | rArCrArCrCrCrCrUrUrG/i2FG/rGrCrGrU/i2FG/rGmCmU*mU*mU*m | |
| | U | |
| ChemMod_Set3_17 | mU*mU*mG*rGrUrGrArCrUrGrCrCrArCrGrCrCrCrArArGrUrUrUrUrArGr | 1147 |
| | AmGmCmUmAmGmAmAmAmUmAmGmCrArArGrUrUrArArArArUrArAr | |
| | GrGrCrUrArGrUrCrCrGrUrUrArUrCmAmAmCmUmUmGmAmAmAmAmA | |
| | mGmUmGmGmCmAmCmCmGmAmGmUmCmGmGmUmGmCrGrUrGrA | |
| | rArCrArCrCrCrCrUrUrG/i2FG/rGrCrGrU/i2FG/mGmCmU*mU*mU* | |
| | mU | |
| ChemMod_Set3_18 | mU*mU*mG*rGrUrGrArCrUrGrCrCrArCrGrCrCrCrArArGrUrUrUrUrArGr | 1148 |
| | AmGmCmUmAmGmAmAmAmUmAmGmCrArArGrUrUrArArArArUrArAr | |
| | GrGrCrUrArGrUrCrCrGrUrUrArUrCmAmAmCmUmUmGmAmAmAmAmA | |
| | mGmUmGmGmCmAmCmCmGmAmGmUmCmGmGmUmGmCrGrUrGrA | |
| | rArCrArCrCrCrCrUrUrG/i2FG/rGrCrGmU/i2FG/mGmCmU*mU*mU* | |
| | mU | |
| ChemMod_Set3_19 | mU*mU*mG*rGrUrGrArCrUrGrCrCrArCrGrCrCrCrArArGrUrUrUrUrArGr | 1149 |
| | AmGmCmUmAmGmAmAmAmUmAmGmCrArArGrUrUrArArArArUrArAr | |
| | GrGrCrUrArGrUrCrCrGrUrUrArUrCmAmAmCmUmUmGmAmAmAmAmA | |
| | mGmUmGmGmCmAmCmCmGmAmGmUmCmGmGmUmGmCrGrUrGrA | |
| | rArCrArCrCrCrCrUrUrG/i2FG/rGrCmGmU/i2FG/mGmCmU*mU*mU | |
| | *mU | |
| ChemMod_Set3_20 | mU*mU*mG*rGrUrGrArCrUrGrCrCrArCrGrCrCrCrArArGrUrUrUrUrArGr | 1150 |
| | AmGmCmUmAmGmAmAmAmUmAmGmCrArArGrUrUrArArArArUrArAr | |
| | GrGrCrUrArGrUrCrCrGrUrUrArUrCmAmAmCmUmUmGmAmAmAmAmA | |
| | mGmUmGmGmCmAmCmCmGmAmGmUmCmGmGmUmGmCrGrUrGrA | |
| | rArCrArCrCrCrCrUrUrG/i2FG/rGmCmGmU/i2FG/mGmCmU*mU*mU | |
| | *mU | |
| ChemMod_Set3_21 | mU*mU*mG*rGrUrGrArCrUrGrCrCrArCrGrCrCrCrArArGrUrUrUrUrArGr | 1151 |
| | AmGmCmUmAmGmAmAmAmUmAmGmCrArArGrUrUrArArArArUrArAr | |
| | GrGrCrUrArGrUrCrCrGrUrUrArUrCmAmAmCmUmUmGmAmAmAmAmA | |
| | mGmUmGmGmCmAmCmCmGmAmGmUmCmGmGmUmGmCrGrUrGrA | |
| | rArCrArCrCrCrCrUrUrG/i2FG/mGmCmGmU/i2FG/mGmCmU*mU*m | |
| | U*mU | |
| ChemMod_Set3_22 | mU*mU*mG*rGrUrGrArCrUrGrCrCrArCrGrCrCrCrArArGrUrUrUrUrArGr | 1152 |
| | AmGmCmUmAmGmAmAmAmUmAmGmCrArArGrUrUrArArArArUrArAr | |
| | GrGrCrUrArGrUrCrCrGrUrUrArUrCmAmAmCmUmUmGmAmAmAmAmA | |
| | mGmUmGmGmCmAmCmCmGmAmGmUmCmGmGmUmGmCrGrUrGrA | |
| | rArCrArCrCrCrCrUrUrG/i2FG/rGrCrGrU/i2FG/mGrCmU*mU*mU*m | |
| | U | |
| ChemMod_Set3_23 | mU*mU*mG*rGrUrGrArCrUrGrCrCrArCrGrCrCrCrArArGrUrUrUrUrArGr | 1153 |
| | AmGmCmUmAmGmAmAmAmUmAmGmCrArArGrUrUrArArArArUrArAr | |
| | GrGrCrUrArGrUrCrCrGrUrUrArUrCmAmAmCmUmUmGmAmAmAmAmA | |
| | mGmUmGmGmCmAmCmCmGmAmGmUmCmGmGmUmGmCrGrUrGrA | |
| | rArCrArCrCrCrCrUrUrG/i2FG/rGrCrGmU/i2FG/rGrCmU*mU*mU*m | |
| | U | |
| ChemMod_Set3_24 | mU*mU*mG*rGrUrGrArCrUrGrCrCrArCrGrCrCrCrArArGrUrUrUrUrArGr | 1154 |
| | AmGmCmUmAmGmAmAmAmUmAmGmCrArArGrUrUrArArArArUrArAr | |
| | GrGrCrUrArGrUrCrCrGrUrUrArUrCmAmAmCmUmUmGmAmAmAmAmA | |
| | mGmUmGmGmCmAmCmCmGmAmGmUmCmGmGmUmGmCrGrUrGrA | |
| | rArCrArCrCrCrCrUrUrG/i2FG/rGrCmGrU/i2FG/rGrCmU*mU*mU*m | |
| | U | |
| ChemMod_Set3_25 | mU*mU*mG*rGrUrGrArCrUrGrCrCrArCrGrCrCrCrArArGrUrUrUrUrArGr | 1155 |
| | AmGmCmUmAmGmAmAmAmUmAmGmCrArArGrUrUrArArArArUrArAr | |
| | GrGrCrUrArGrUrCrCrGrUrUrArUrCmAmAmCmUmUmGmAmAmAmAmA | |
| | mGmUmGmGmCmAmCmCmGmAmGmUmCmGmGmUmGmCrGrUrGrA | |
| | rArCrArCrCrCrCrUrUrG/i2FG/rGmCrGrU/i2FG/rGrCmU*mU*mU*m | |
| | U | |
| ChemMod_Set3_26 | mU*mU*mG*rGrUrGrArCrUrGrCrCrArCrGrCrCrCrArArGrUrUrUrUrArGr | 1156 |
| | AmGmCmUmAmGmAmAmAmUmAmGmCrArArGrUrUrArArArArUrArAr | |
| | GrGrCrUrArGrUrCrCrGrUrUrArUrCmAmAmCmUmUmGmAmAmAmAmA | |
| | mGmUmGmGmCmAmCmCmGmAmGmUmCmGmGmUmGmCrGrUrGrA | |
| | rArCrArCrCrCrCrUrUrG/i2FG/mGrCrGrU/i2FG/rGrCmU*mU*mU*m | |
| | U | |
| ChemMod_Set3_27 | mU*mU*mG*rGrUrGrArCrUrGrCrCrArCrGrCrCrCrArArGrUrUrUrUrArGr | 1157 |
| | AmGmCmUmAmGmAmAmAmUmAmGmCrArArGrUrUrArArArArUrArAr | |
| | GrGrCrUrArGrUrCrCrGrUrUrArUrCmAmAmCmUmUmGmAmAmAmAmA | |
| | mGmUmGmGmCmAmCmCmGmAmGmUmCmGmGmUmGmCrGrUGrAr | |
| | ACrArCCrCrCTrUrG/i2FG/rGrCrGrU/i2FG/rGrCmU*mU*mU*mU | |
| ChemMod_Set3_28 | mU*mU*mG*rGrUrGrArCrUrGrCrCrArCrGrCrCrCrArArGrUrUrUrUrArGr | 1158 |
| | AmGmCmUmAmGmAmAmAmUmAmGmCrArArGrUrUrArArArArUrArAr | |
| | GrGrCrUrArGrUrCrCrGrUrUrArUrCmAmAmCmUmUmGmAmAmAmAmA | |
| | mGmUmGmGmCmAmCmCmGmAmGmUmCmGmGmUmGmCrGrUrGrA | |
| | rArCrArCrCrCrCrUrUrG/i2FG/rGrCrGrU/i2FG/rGrCmU*mU*mU*m | |
| | U*mU | |
| ChemMod_Set3_29 | mU*mU*mG*rGrUrGrArCrUrGrCrCrArCrGrCrCrCrArArGrUrUrUrUrArGr | 1159 |
| | AmGmCmUmAmGmAmAmAmUmAmGmCrArArGrUrUrArArArArUrArAr | |
| | GrGrCrUrArGrUrCrCrGrUrUrArUrCmAmAmCmUmUmGmAmAmAmAmA | |
| | mGmUmGmGmCmAmCmCmGmAmGmUmCmGmGmUmGmCrGrUrGrA | |
| | rArCrArCrCrCrCrUrUrG/i2FG/rGrCrGrU/i2FG/rGrCmU*mU*mU*m | |
| | U*mU*mU | |
| ChemMod_Set3_30 | mU*mU*mG*rGrUrGrArCrUrGrCrCrArCrGrCrCrCrArArGrUrUrUrUrArGr | 1160 |
| | AmGmCmUmAmGmAmAmAmUmAmGmCrArArGrUrUrArArArArUrArAr | |
| | GrGrCrUrArGrUrCrCrGrUrUrArUrCmAmAmCmUmUmGmAmAmAmAmA | |
| | mGmUmGmGmCmAmCmCmGmAmGmUmCmGmGmUmGmCrGrUrGrA | |
| | rArCrArCrCrCrCrUrUrG/i2FG/rGrCrGrU/i2FG/rGrCmU*mU*mU*m | |
| | U*mU*mU*mU | |

¹For RNA, U are T in the sequence listing. For each entry, the spacer sequence is underlined and the extension arm is bold.
²For the sequences: *, phosphorothioate modification; mN, 2′O-methyl modification; rN, unmodified ribonucleotide; i2FN, Int Fluoro modification. A position lacking, e.g., r or m (or positions noted as T) are DNA positions within the RNA. N = A ,C, T/U, G.

TABLE 39C
EXEMPLARY MODIFIED tagRNAS (ATP7B)

| NAME | SEQUENCE^{1,2} | SEQ ID NO: |
|---|---|---|
| Set4_v1 | mU*mU*mG*rGrUrGrArCrUrGrCrCrArCrGrCrCrCrArArGrUrUrUrUrArGr | 1161 |
| | AmGmCmUmAmGmAmAmAmUmAmGmCrArArGrUrUrArArArArUrArAr | |
| | GrGrCrUrArGrUrCrCrGrUrUrArUrCmAmAmCmUmUmGmAmAmAmAmA | |
| | mGmUmGmGmCmAmCmCmGmAmGmUmCmGmGmUmGmCrGrUrGrA | |
| | rArCrArCrCrCrCrUrUrGrGrGrCrGrUrGrG/i2MOErC/mU*mU*mU* | |
| | mU | |
| Set4_v2 | mU*mU*mG*rGrUrGrArCrUrGrCrCrArCrGrCrCrCrArArGrUrUrUrUrArGr | 1162 |
| | AmGmCmUmAmGmAmAmAmUmAmGmCrArArGrUrUrArArArArUrArAr | |
| | GrGrCrUrArGrUrCrCrGrUrUrArUrCmAmAmCmUmUmGmAmAmAmAmA | |
| | mGmUmGmGmCmAmCmCmGmAmGmUmCmGmGmUmGmCrGrUrGrA | |
| | rArCrArCrCrCrCrUrUrGrGrGrCrGrUrG/i2MOErG/rCmU*mU*mU* | |
| | mU | |
| Set4_v3 | mU*mU*mG*rGrUrGrArCrUrGrCrCrArCrGrCrCrCrArArGrUrUrUrUrArGr | 1163 |
| | AmGmCmUmAmGmAmAmAmUmAmGmCrArArGrUrUrArArArArUrArAr | |
| | GrGrCrUrArGrUrCrCrGrUrUrArUrCmAmAmCmUmUmGmAmAmAmAmA | |
| | mGmUmGmGmCmAmCmCmGmAmGmUmCmGmGmUmGmCrGrUrGrA | |
| | rArCrArCrCrCrCrUrUrGrGrGrCrGrU/i2MOErG/rGrCmU*mU*mU* | |
| | mU | |
| Set4_v4 | mU*mU*mG*rGrUrGrArCrUrGrCrCrArCrGrCrCrCrArArGrUrUrUrUrArGr | 1164 |
| | AmGmCmUmAmGmAmAmAmUmAmGmCrArArGrUrUrArArArArUrArAr | |
| | GrGrCrUrArGrUrCrCrGrUrUrArUrCmAmAmCmUmUmGmAmAmAmAmA | |
| | mGmUmGmGmCmAmCmCmGmAmGmUmCmGmGmUmGmCrGrUrGrA | |
| | rArCrArCrCrCrCrUrUrGrGrGrCrG/i2MOErT/rGrGrCmU*mU*mU*m | |
| | U | |
| Set4_v5 | mU*mU*mG*rGrUrGrArCrUrGrCrCrArCrGrCrCrCrArArGrUrUrUrUrArGr | 1165 |
| | AmGmCmUmAmGmAmAmAmUmAmGmCrArArGrUrUrArArArArUrArAr | |
| | GrGrCrUrArGrUrCrCrGrUrUrArUrCmAmAmCmUmUmGmAmAmAmAmA | |
| | mGmUmGmGmCmAmCmCmGmAmGmUmCmGmGmUmGmCrGrUrGrA | |
| | rArCrArCrCrCrCrUrUrGrGrGrC/i2MOErG/rUrGrGrCmU*mU*mU* | |
| | mU | |
| Set4_v6 | mU*mU*mG*rGrUrGrArCrUrGrCrCrArCrGrCrCrCrArArGrUrUrUrUrArGr | 1166 |
| | AmGmCmUmAmGmAmAmAmUmAmGmCrArArGrUrUrArArArArUrArAr | |
| | GrGrCrUrArGrUrCrCrGrUrUrArUrCmAmAmCmUmUmGmAmAmAmAmA | |
| | mGmUmGmGmCmAmCmCmGmAmGmUmCmGmGmUmGmCrGrUrGrA | |
| | rArCrArCrCrCrCrUrUrGrGrG/i2MOErC/rGrUrGrGrCmU*mU*mU* | |
| | mU | |
| Set4_v7 | mU*mU*mG*rGrUrGrArCrUrGrCrCrArCrGrCrCrCrArArGrUrUrUrUrArGr | 1167 |
| | AmGmCmUmAmGmAmAmAmUmAmGmCrArArGrUrUrArArArArUrArAr | |
| | GrGrCrUrArGrUrCrCrGrUrUrArUrCmAmAmCmUmUmGmAmAmAmAmA | |
| | mGmUmGmGmCmAmCmCmGmAmGmUmCmGmGmUmGmCrGrUrGrA | |
| | rArCrArCrCrCrCrUrUrGrG/i2MOErG/rCrGrUrGrGrCmU*mU*mU* | |
| | mU | |
| Set4_v8 | mU*mU*mG*rGrUrGrArCrUrGrCrCrArCrGrCrCrCrArArGrUrUrUrUrArGr | 1168 |
| | AmGmCmUmAmGmAmAmAmUmAmGmCrArArGrUrUrArArArArUrArAr | |
| | GrGrCrUrArGrUrCrCrGrUrUrArUrCmAmAmCmUmUmGmAmAmAmAmA | |
| | mGmUmGmGmCmAmCmCmGmAmGmUmCmGmGmUmGmCrGrUrGrA | |
| | rArCrArCrCrCrCrUrUrG/i2MOErG/rGrCrGrUrGrGrCmU*mU*mU* | |
| | mU | |
| Set4_v9 | mU*mU*mG*rGrUrGrArCrUrGrCrCrArCrGrCrCrCrArArGrUrUrUrUrArGr | 1169 |
| | AmGmCmUmAmGmAmAmAmUmAmGmCrArArGrUrUrArArArArUrArAr | |
| | GrGrCrUrArGrUrCrCrGrUrUrArUrCmAmAmCmUmUmGmAmAmAmAmA | |
| | mGmUmGmGmCmAmCmCmGmAmGmUmCmGmGmUmGmCrGrUrGrA | |
| | rArCrArCrCrCrCrUrUrG/i2MOErG/rGrCrGrU/i2MOErG/rGrCmU*m | |
| | U*mU*mU | |
| Set4_v10 | mU*mU*mG*rGrUrGrArCrUrGrCrCrArCrGrCrCrCrArArGrUrUrUrUrArGr | 1170 |
| | AmGmCmUmAmGmAmAmAmUmAmGmCrArArGrUrUrArArArArUrArAr | |
| | GrGrCrUrArGrUrCrCrGrUrUrArUrCmAmAmCmUmUmGmAmAmAmAmA | |
| | mGmUmGmGmCmAmCmCmGmAmGmUmCmGmGmUmGmCrGrUrGrA | |
| | rArCrArCrCrCrCrUrUrGrGrGrCrGrUrGrGCmU*mU*mU*mU | |
| Set4_v11 | mU*mU*mG*rGrUrGrArCrUrGrCrCrArCrGrCrCrCrArArGrUrUrUrUrArGr | 1171 |
| | AmGmCmUmAmGmAmAmAmUmAmGmCrArArGrUrUrArArArArUrArAr | |
| | GrGrCrUrArGrUrCrCrGrUrUrArUrCmAmAmCmUmUmGmAmAmAmAmA | |
| | mGmUmGmGmCmAmCmCmGmAmGmUmCmGmGmUmGmCrGrUrGrA | |
| | rArCrArCrCrCrCrUrUrGrGrGrCrGrUrGGrCmU*mU*mU*mU | |
| Set4_v12 | mU*mU*mG*rGrUrGrArCrUrGrCrCrArCrGrCrCrCrArArGrUrUrUrUrArGr | 1172 |
| | AmGmCmUmAmGmAmAmAmUmAmGmCrArArGrUrUrArArArArUrArAr | |
| | GrGrCrUrArGrUrCrCrGrUrUrArUrCmAmAmCmUmUmGmAmAmAmAmA | |
| | mGmUmGmGmCmAmCmCmGmAmGmUmCmGmGmUmGmCrGrUrGrA | |
| | rArCrArCrCrCrCrUrUrGrGrGrCrGrUGrGrCmU*mU*mU*mU | |
| Set4_v13 | mU*mU*mG*rGrUrGrArCrUrGrCrCrArCrGrCrCrCrArArGrUrUrUrUrArGr | 1173 |
| | AmGmCmUmAmGmAmAmAmUmAmGmCrArArGrUrUrArArArArUrArAr | |
| | GrGrCrUrArGrUrCrCrGrUrUrArUrCmAmAmCmUmUmGmAmAmAmAmA | |
| | mGmUmGmGmCmAmCmCmGmAmGmUmCmGmGmUmGmCrGrUrGrA | |
| | rArCrArCrCrCrCrUrUrGrGrGrCrGTrGrGrCmU*mU*mU*mU | |
| Set4_v14 | mU*mU*mG*rGrUrGrArCrUrGrCrCrArCrGrCrCrCrArArGrUrUrUrUrArGr | 1174 |
| | AmGmCmUmAmGmAmAmAmUmAmGmCrArArGrUrUrArArArArUrArAr | |
| | GrGrCrUrArGrUrCrCrGrUrUrArUrCmAmAmCmUmUmGmAmAmAmAmA | |
| | mGmUmGmGmCmAmCmCmGmAmGmUmCmGmGmUmGmCrGrUrGrA | |
| | rArCrArCrCrCrCrUrUrGrGrGrCGrUrGrGrCmU*mU*mU*mU | |
| Set4_v15 | mU*mU*mG*rGrUrGrArCrUrGrCrCrArCrGrCrCrCrArArGrUrUrUrUrArGr | 1175 |
| | AmGmCmUmAmGmAmAmAmUmAmGmCrArArGrUrUrArArArArUrArAr | |
| | GrGrCrUrArGrUrCrCrGrUrUrArUrCmAmAmCmUmUmGmAmAmAmAmA | |
| | mGmUmGmGmCmAmCmCmGmAmGmUmCmGmGmUmGmCrGrUrGrA | |
| | rArCrArCrCrCrCrUrUrGrGrGCrGrUrGrGrCmU*mU*mU*mU | |
| Set4_v16 | mU*mU*mG*rGrUrGrArCrUrGrCrCrArCrGrCrCrCrArArGrUrUrUrUrArGr | 1176 |
| | AmGmCmUmAmGmAmAmAmUmAmGmCrArArGrUrUrArArArArUrArAr | |
| | GrGrCrUrArGrUrCrCrGrUrUrArUrCmAmAmCmUmUmGmAmAmAmAmA | |
| | mGmUmGmGmCmAmCmCmGmAmGmUmCmGmGmUmGmCrGrUrGrA | |
| | rArCrArCrCrCrCrUrUrGrGGrCrGrUrGrGrCmU*mU*mU*mU | |
| Set4_v17 | mU*mU*mG*rGrUrGrArCrUrGrCrCrArCrGrCrCrCrArArGrUrUrUrUrArGr | 1177 |
| | AmGmCmUmAmGmAmAmAmUmAmGmCrArArGrUrUrArArArArUrArAr | |
| | GrGrCrUrArGrUrCrCrGrUrUrArUrCmAmAmCmUmUmGmAmAmAmAmA | |
| | mGmUmGmGmCmAmCmCmGmAmGmUmCmGmGmUmGmCrGrUrGrA | |
| | rArCrArCrCrCrCrUrUrGGrGrCrGrUrGrGrCmU*mU*mU*mU | |
| Set4_v18 | mU*mU*mG*rGrUrGrArCrUrGrCrCrArCrGrCrCrCrArArGrUrUrUrUrArGr | 1178 |
| | AmGmCmUmAmGmAmAmAmUmAmGmCrArArGrUrUrArArArArUrArAr | |
| | GrGrCrUrArGrUrCrCrGrUrUrArUrCmAmAmCmUmUmGmAmAmAmAmA | |
| | mGmUmGmGmCmAmCmCmGmAmGmUmCmGmGmUmGmCrGrUrGrA | |
| | rArCrArCrCrCrCrUrUrGGrGrCrGrUGrGrCmU*mU*mU*mU | |
| Set4_v19 | mU*mU*mG*rGrUrGrArCrUrGrCrCrArCrGrCrCrCrArArGrUrUrUrUrArGr | 1179 |
| | AmGmCmUmAmGmAmAmAmUmAmGmCrArArGrUrUrArArArArUrArAr | |
| | GrGrCrUrArGrUrCrCrGrUrUrArUrCmAmAmCmUmUmGmAmAmAmAmA | |
| | mGmUmGmGmCmAmCmCmGmAmGmUmCmGmGmUmGmCrGrUrGrA | |
| | rArCrArCrCrCrCrUrUrG/i2FG/rGrCrG/i2FU//i2FG/rGrCmU*mU*mU | |
| | *mU | |
| Set4_v20 | mU*mU*mG*rGrUrGrArCrUrGrCrCrArCrGrCrCrCrArArGrUrUrUrUrArGr | 1180 |
| | AmGmCmUmAmGmAmAmAmUmAmGmCrArArGrUrUrArArArArUrArAr | |
| | GrGrCrUrArGrUrCrCrGrUrUrArUrCmAmAmCmUmUmGmAmAmAmAmA | |
| | mGmUmGmGmCmAmCmCmGmAmGmUmCmGmGmUmGmCrGrUrGrA | |
| | rArCrArCrCrCrCrUrUrG/i2FG/rGrCmG/i2FU//i2FG/mGmCmU*mU*m | |
| | U*mU | |
| Set4_v21 | mU*mU*mG*rGrUrGrArCrUrGrCrCrArCrGrCrCrCrArArGrUrUrUrUrArGr | 1181 |
| | AmGmCmUmAmGmAmAmAmUmAmGmCrArArGrUrUrArArArArUrArAr | |
| | GrGrCrUrArGrUrCrCrGrUrUrArUrCmAmAmCmUmUmGmAmAmAmAmA | |
| | mGmUmGmGmCmAmCmCmGmAmGmUmCmGmGmUmGmCrGrUrGrA | |
| | rArCrArCrCrCrCrUrUrGrGrGrCrG/i2FU/rGrGrCmU*mU*mU*/3Invd | |
| | T/ | |
| Set4_v22 | mU*mU*mG*rGrUrGrArCrUrGrCrCrArCrGrCrCrCrArArGrUrUrUrUrArGr | 1182 |
| | AmGmCmUmAmGmAmAmAmUmAmGmCrArArGrUrUrArArArArUrArAr | |
| | GrGrCrUrArGrUrCrCrGrUrUrArUrCmAmAmCmUmUmGmAmAmAmAmA | |
| | mGmUmGmGmCmAmCmCmGmAmGmUmCmGmGmUmGmCrGrUrGrA | |
| | rArCrArCrCrCrCrUrUrGrGrGrCrG/i2FU/mG*mG*mC*/3InvdT/ | |
| Set4_v23 | mU*mU*mG*rGrUrGrArCrUrGrCrCrArCrGrCrCrCrArArGrUrUrUrUrArGr | 1183 |
| | AmGmCmUmAmGmAmAmAmUmAmGmCrArArGrUrUrArArArArUrArAr | |
| | GrGrCrUrArGrUrCrCrGrUrUrArUrCmAmAmCmUmUmGmAmAmAmAmA | |
| | mGmUmGmGmCmAmCmCmGmAmGmUmCmGmGmUmGmCrGrUrGrA | |
| | rArCrArCrCrCrCrUrUrG/i2FG/rGrCrGrU/i2FG/rGrCmU*mU*mU*/ | |
| | 3InvdT/ | |
| Set4_v24 | mU*mU*mG*rGrUrGrArCrUrGrCrCrArCrGrCrCrCrArArGrUrUrUrUrArGr | 1184 |
| | AmGmCmUmAmGmAmAmAmUmAmGmCrArArGrUrUrArArArArUrArAr | |
| | GrGrCrUrArGrUrCrCrGrUrUrArUrCmAmAmCmUmUmGmAmAmAmAmA | |
| | mGmUmGmGmCmAmCmCmGmAmGmUmCmGmGmUmGmCrGrUrGrA | |
| | rArCrArCrCrCrCrUrUrG/i2FG/rGrCrGrU/i2FG/mGmC*mU*mU*/ | |
| | 3InvdT/ | |
| Set4_v25 | mU*mU*mG*rGrUrGrArCrUrGrCrCrArCrGrCrCrCrArArGrUrUrUrUrArGr | 1185 |
| | AmGmCmUmAmGmAmAmAmUmAmGmCrArArGrUrUrArArArArUrArAr | |
| | GrGrCrUrArGrUrCrCrGrUrUrArUrCmAmAmCmUmUmGmAmAmAmAmA | |
| | mGmUmGmGmCmAmCmCmGmAmGmUmCmGmGmUmGmCrGrUrGrA | |
| | rArCrArCrCrCrCrUrUrG/i2FG/rGrCrGrU/i2FG/mG*mC*mU*/3InvdT/ | |
| Set4_v26 | mU*mU*mG*rGrUrGrArCrUrGrCrCrArCrGrCrCrCrArArGrUrUrUrUrArGr | 1186 |
| | AmGmCmUmAmGmAmAmAmUmAmGmCrArArGrUrUrArArArArUrArAr | |
| | GrGrCrUrArGrUrCrCrGrUrUrArUrCmAmAmCmUmUmGmAmAmAmAmA | |
| | mGmUmGmGmCmAmCmCmGmAmGmUmCmGmGmUmGmCrGrUrGrA | |
| | rArCrArCrCrCrCrUrUrG/i2FG/rGrCrG/i2FU//i2FG/*mG*mC*/3InvdT/ | |
| Set4_v27 | mU*mU*mG*rGrUrGrArCrUrGrCrCrArCrGrCrCrCrArArGrUrUrUrUrArGr | 1187 |
| | AmGmCmUmAmGmAmAmAmUmAmGmCrArArGrUrUrArArArArUrArAr | |
| | GrGrCrUrArGrUrCrCrGrUrUrArUrCmAmAmCmUmUmGmAmAmAmAmA | |
| | mGmUmGmGmCmAmCmCmGmAmGmUmCmGmGmUmGmCrGrUrGrA | |
| | rArCrArCrCrCrCrUrUrG/i2FG/rGrCrGrU/i2FG/*mG*mC*/3InvdT/ | |
| Set4_v28 | mU*mU*mG*rGrUrGrArCrUrGrCrCrArCrGrCrCrCrArArGrUrUrUrUrArGr | 1188 |
| | AmGmCmUmAmGmAmAmAmUmAmGmCrArArGrUrUrArArArArUrArAr | |
| | GrGrCrUrArGrUrCrCrGrUrUrArUrCmAmAmCmUmUmGmAmAmAmAmA | |
| | mGmUmGmGmCmAmCmCmGmAmGmUmCmGmGmUmGmCrGrUrGrA | |
| | rArCrArCrCrCrCrUrUrG/i2FG/rGrCrGrU/i2FG/mG*mC*/3InvdT/ | |
| Set4_v29 | mU*mU*mG*rGrUrGrArCrUrGrCrCrArCrGrCrCrCrArArGrUrUrUrUrArGr | 1189 |
| | AmGmCmUmAmGmAmAmAmUmAmGmCrArArGrUrUrArArArArUrArAr | |
| | GrGrCrUrArGrUrCrCrGrUrUrArUrCmAmAmCmUmUmGmAmAmAmAmA | |
| | mGmUmGmGmCmAmCmCmGmAmGmUmCmGmGmUmGmCrGrUrGrA | |
| | rArCrArCrCrCrCrUrUrG/i2FG/rGrCrGrU/i2FG/rGmC*mU*mU*mU | |
| Set4_v30 | mU*mU*mG*rGrUrGrArCrUrGrCrCrArCrGrCrCrCrArArGrUrUrUrUrArGr | 1190 |
| | AmGmCmUmAmGmAmAmAmUmAmGmCrArArGrUrUrArArArArUrArAr | |
| | GrGrCrUrArGrUrCrCrGrUrUrArUrCmAmAmCmUmUmGmAmAmAmAmA | |
| | mGmUmGmGmCmAmCmCmGmAmGmUmCmGmGmUmGmCrGrUrGrA | |
| | rArCrArCrCrCrCrUrUrG/i2FG/rGrCrGrU/i2FG/mG*mC*mU*mU | |
| Set4_v31 | mU*mU*mG*rGrUrGrArCrUrGrCrCrArCrGrCrCrCrArArGrUrUrUrUrArGr | 1191 |
| | AmGmCmUmAmGmAmAmAmUmAmGmCrArArGrUrUrArArArArUrArAr | |
| | GrGrCrUrArGrUrCrCrGrUrUrArUrCmAmAmCmUmUmGmAmAmAmAmA | |
| | mGmUmGmGmCmAmCmCmGmAmGmUmCmGmGmUmGmCrGrUrGrA | |
| | rArCrArCrCrCrCrUrUrG/i2FG/rGrCrGrU/i2FG/*mG*mC*mU | |
| Set4_v32 | mU*mU*mG*rGrUrGrArCrUrGrCrCrArCrGrCrCrCrArArGrUrUrUrUrArGr | 1192 |
| | AmGmCmUmAmGmAmAmAmUmAmGmCrArArGrUrUrArArArArUrArAr | |
| | GrGrCrUrArGrUrCrCrGrUrUrArUrCmAmAmCmUmUmGmAmAmAmAmA | |
| | mGmUmGmGmCmAmCmCmGmAmGmUmCmGmGmUmGmCrGrUrGrA | |
| | rArCrArCrCrCrCrUrUrG/i2FG/rGrCrGmU*/i2FG/*mG*mC | |
| Set4_v33 | mU*mU*mG*rGrUrGrArCrUrGrCrCrArCrGrCrCrCrArArGrUrUrUrUrArGr | 1193 |
| | AmGmCmUmAmGmAmAmAmUmAmGmCrArArGrUrUrArArArArUrArAr | |
| | GrGrCrUrArGrUrCrCrGrUrUrArUrCmAmAmCmUmUmGmAmAmAmAmA | |
| | mGmUmGmGmCmAmCmCmGmAmGmUmCmGmGmUmGmCrGrUrGrA | |
| | rArCrArCrCrCrCrUrUrGrGrGrCrG/i2FU/mGmGmCmU*mU*mU*mU | |
| Set4_v34 | mU*mU*mG*rGrUrGrArCrUrGrCrCrArCrGrCrCrCrArArGrUrUrUrUrArGr | 1194 |
| | AmGmCmUmAmGmAmAmAmUmAmGmCrArArGrUrUrArArArArUrArAr | |
| | GrGrCrUrArGrUrCrCrGrUrUrArUrCmAmAmCmUmUmGmAmAmAmAmA | |
| | mGmUmGmGmCmAmCmCmGmAmGmUmCmGmGmUmGmCrGrUrGrA | |
| | rArCrArCrCrCrCrUrUrGrGrGrCmG/i2FU/mGmGmCmU*mU*mU*m | |
| | U | |
| Set4_v35 | mU*mU*mG*rGrUrGrArCrUrGrCrCrArCrGrCrCrCrArArGrUrUrUrUrArGr | 1195 |
| | AmGmCmUmAmGmAmAmAmUmAmGmCrArArGrUrUrArArArArUrArAr | |
| | GrGrCrUrArGrUrCrCrGrUrUrArUrCmAmAmCmUmUmGmAmAmAmAmA | |
| | mGmUmGmGmCmAmCmCmGmAmGmUmCmGmGmUmGmCrGrUrGrA | |
| | rArCrArCrCrCrCrUrUrGrGrGmCrG/i2FU/rGrGrCmU*mU*mU*mU | |
| Set4_v36 | mU*mU*mG*rGrUrGrArCrUrGrCrCrArCrGrCrCrCrArArGrUrUrUrUrArGr | 1196 |
| | AmGmCmUmAmGmAmAmAmUmAmGmCrArArGrUrUrArArArArUrArAr | |
| | GrGrCrUrArGrUrCrCrGrUrUrArUrCmAmAmCmUmUmGmAmAmAmAmA | |
| | mGmUmGmGmCmAmCmCmGmAmGmUmCmGmGmUmGmCrGrUrGrA | |
| | rArCrArCrCrCrCrUrUrGrGmGrCrG/i2FU/rGrGrCmU*mU*mU*mU | |
| Set4_v37 | mU*mU*mG*rGrUrGrArCrUrGrCrCrArCrGrCrCrCrArArGrUrUrUrUrArGr | 1197 |
| | AmGmCmUmAmGmAmAmAmUmAmGmCrArArGrUrUrArArArArUrArAr | |
| | GrGrCrUrArGrUrCrCrGrUrUrArUrCmAmAmCmUmUmGmAmAmAmAmA | |
| | mGmUmGmGmCmAmCmCmGmAmGmUmCmGmGmUmGmCrGrUrGrA | |
| | rArCrArCrCrCrCrUrUrGmGrGrCrG/i2FU/rGrGrCmU*mU*mU*mU | |
| Set4_v38 | mU*mU*mG*rGrUrGrArCrUrGrCrCrArCrGrCrCrCrArArGrUrUrUrUrArGr | 1198 |
| | AmGmCmUmAmGmAmAmAmUmAmGmCrArArGrUrUrArArArArUrArAr | |
| | GrGrCrUrArGrUrCrCrGrUrUrArUrCmAmAmCmUmUmGmAmAmAmAmA | |
| | mGmUmGmGmCmAmCmCmGmAmGmUmCmGmGmUmGmCrGrUrGrA | |
| | rArCrArCrCrCrCrUrUrG/i2FG//i2FG/rCrGmUmGmGmCmU*mU*mU | |
| | *mU | |
| Set4_v39 | mU*mU*mG*rGrUrGrArCrUrGrCrCrArCrGrCrCrCrArArGrUrUrUrUrArGr | 1199 |
| | AmGmCmUmAmGmAmAmAmUmAmGmCrArArGrUrUrArArArArUrArAr | |
| | GrGrCrUrArGrUrCrCrGrUrUrArUrCmAmAmCmUmUmGmAmAmAmAmA | |
| | mGmUmGmGmCmAmCmCmGmAmGmUmCmGmGmUmGmCrGrUrGrA | |
| | rArCrArCrCrCrCrUrUrG/i2FG//i2FG/rCrGmUrGmGmCmU*mU*mU* | |
| | mU | |
| Set4_v40 | mU*mU*mG*rGrUrGrArCrUrGrCrCrArCrGrCrCrCrArArGrUrUrUrUrArGr | 1200 |
| | AmGmCmUmAmGmAmAmAmUmAmGmCrArArGrUrUrArArArArUrArAr | |
| | GrGrCrUrArGrUrCrCrGrUrUrArUrCmAmAmCmUmUmGmAmAmAmAmA | |
| | mGmUmGmGmCmAmCmCmGmAmGmUmCmGmGmUmGmCrGrUrGrA | |
| | rArCrArCrCrCrCrUrUrG/i2FG//i2FG/rCmGmUmGmGmCmU*mU*mU | |
| | *mU | |
| Set4_v41 | mU*mU*mG*rGrUrGrArCrUrGrCrCrArCrGrCrCrCrArArGrUrUrUrUrArGr | 1201 |
| | AmGmCmUmAmGmAmAmAmUmAmGmCrArArGrUrUrArArArArUrArAr | |
| | GrGrCrUrArGrUrCrCrGrUrUrArUrCmAmAmCmUmUmGmAmAmAmAmA | |
| | mGmUmGmGmCmAmCmCmGmAmGmUmCmGmGmUmGmCrGrUrGrA | |
| | rArCrArCrCrCrCrUrUrG/i2FG//i2FG/rCmGmUrGmGmCmU*mU*mU | |
| | *mU | |
| Set4_v42 | mU*mU*mG*rGrUrGrArCrUrGrCrCrArCrGrCrCrCrArArGrUrUrUrUrArGr | 1202 |
| | AmGmCmUmAmGmAmAmAmUmAmGmCrArArGrUrUrArArArArUrArAr | |
| | GrGrCrUrArGrUrCrCrGrUrUrArUrCmAmAmCmUmUmGmAmAmAmAmA | |
| | mGmUmGmGmCmAmCmCmGmAmGmUmCmGmGmUmGmCrGrUrGrA | |
| | rArCrArCrCrCrCrUrUrG/i2FG//i2FG/mCrGrUrGrGrCmU*mU*mU*m | |
| | U | |
| Set4_v43 | mU*mU*mG*rGrUrGrArCrUrGrCrCrArCrGrCrCrCrArArGrUrUrUrUrArGr | 1203 |
| | AmGmCmUmAmGmAmAmAmUmAmGmCrArArGrUrUrArArArArUrArAr | |
| | GrGrCrUrArGrUrCrCrGrUrUrArUrCmAmAmCmUmUmGmAmAmAmAmA | |
| | mGmUmGmGmCmAmCmCmGmAmGmUmCmGmGmUmGmCrGrUrGrA | |
| | rArCrArCrCrCrCrUrUrG/i2FG/mGmCrGrU/i2FG/rGrCmU*mU*mU* | |
| | mU | |

¹For RNA, U are T in the sequence listing. For each entry, the spacer sequence is underlined and the extension arm is bold.
²For the sequences: *, phosphorothioate modification; mN, 2′O-methyl modification; rN, unmodified ribonucleotide; i2FN, Int Fluoro modification; i2MOErN, internal 2-O-Methyoxyethyl modification. A position lacking, e.g., r or m (or positions noted as T) are DNA positions within the RNA. N = A, C, T/U, G.

[0332] Editing efficiencies using the modified tagRNAs are shown in FIG. 43-FIG. 45.

### Example 12

### In Vivo Data

[0333] This Example provides exemplary in vivo data derived from studies of the disclosed compositions and methods.

### Wilson's Disease Mouse Model Study

[0334] LNP delivery of RT editing components was performed in mouse engineered with humanized ATP7B3 gene with the H1069Q mutation. Table 40 below displays components of the mouse studies.

TABLE 40
MOUSE STUDY

| | |
|---|---|
| mRNA | |
| (name in FIG. 46-FIG. 47) | mRNA alias |

Study 1^{a}

| | |
|---|---|
| pTPRT298 | pTPRT-U-298; |
| (SEQ ID NO: 1041) | PKU-m001 mRNA |
| pTPRT493 | pTPRT-U-493; |
| (SEQ ID NO: 1043) | PKU-m003 mRNA |
| pVC313 | mRNA containing RV-UML-m007 |
| (SEQ ID NO: 939) | 5′UTR (see Table 30) |

Study 2^{b}

| | |
|---|---|
| pVC299 | Contains NCA7d 5′UTR, |
| (SEQ ID NO: 1204) | Seq ID NO: 910 in Table 29 |
| pVC313 | mRNA containing RV-UML-m007 |
| (SEQ ID NO: 939) | 5′UTR (see Table 30) |

^{a}tagRNA, ChemMod_Set3_19; egRNA, BK g040
^{b}tagRNA, ChemMod_Set3_19 or ChemMod_Set3_25; egRNA, BK g040

[0335] Table 41 below provides additional information regarding the mRNAs used in the mouse study shown in FIG. 46. In FIG. 46, mice were dosed at 2 mpk.

TABLE 41
mRNAs of MOUSE STUDY

| | pTPRT298* | pTPRT493* | PVC313 |
|---|---|---|---|
| 5′UTR | Custom 5′UTR | Syn_5′UTR | m007 |
| Cas9 | SpCas9 R221K | SpCas9 R221K | SpCas9 R221K |
| | N394K H840A | N394K H840A | N394K H840A |
| Linker | GS-bpNLS-GS | PAPAP-8 | GS-bpNLS-GS |
| RT | MMLV | MMLV | Myotis brandtii |
| 3′UTR | HBA1 | HBA1 | HBA1 |
| Stabilizing element | STH | WPRE | None |
| Poly A | Seg. PolyA4 | Seg. PolyA4 | Seg. PolyA4 |

*See PKU study above in Example 7

[0336] pVC313 mRNA and S3_19 tagRNA were used above, at 2 mpk (FIG. 46). As shown in FIG. 47, two mRNAs were compared. pVC299 has NCA7d 5′UTR and pVC313 has m007 5′UTR. Two tagRNAs were compared. S3_19 has four extra 2′OMe in the FBS, while S3_25 has one extra 2′OMe in the FBS (different position from S3_19 2′OMe positions). All 3 LNPs were dosed at 1 mpk. The results indicate that pVC313 was the most effective (˜56%) out of the three mRNAs in precise correction of the H1069Q mutation.

### PKU Disease Mouse Model Study

[0337] Next, corrections of the R408W mutation in the PAH gene (PAH-R408W) was tested in vivo. Table 42A shows some of the sequences used in this study. Precise correction of PAH-R408W in liver of humanized mice (het) at 2 mpk was assessed. In these experiments, the indicated mRNA with PKU-g007 NGG1 tagRNA and NGG1 (+37) egRNA was used. Delivery was performed using a lipid nanoparticle formulation (1.5% PEG, 1-step, acetate pH 4). The results indicate that pVC313, which also worked best for Wilson's Disease (see above), showed the best precise editing efficiency of the PAH-R408W mutation, demonstrating consistency across at least two indications (loci, spacers). Shown in Table 42B below and FIG. 48 are the results of the study.

TABLE 42A
mRNAs RELATED TO PKU MOUSE STUDY

| | Protein | mRNA |
|---|---|---|
| | Sequence | Sequence |
| Name | (SEQ ID NO:) | (SEQ ID NO:) |
| pTPRT-U-554 | 1326 | 1327 |
| pTPRT-U-558 | 1326 | 1328 |

TABLE 42B
PRECISE EDITING

| mRNA | % Integrity |
|---|---|
| pTPRT-U-493 | 73.1 |
| pTPRT-U-540 | 78.2 |
| pTPRT-U-543 | 75 |
| pTPRT-U-554 | 72.5 |
| pTPRT-U-558 | 78.6 |
| pVC313 | 84.1 |
| pVC268 | 80.8 |
| pAM198 | 85.6 |

### Example 13

### SpyCas9 gRNA Scaffolds

[0338] Described in this Example are SpyCas9 scaffold variants designed with different sequences and different chemical modification patterns. Below in Table 43 are the designed scaffolds.

TABLE 43
EXEMPLARY MODIFIED tagRNAS (ATP7B)

| NAME | SEQUENCE^{1,2} | SEQ ID NO: |
|---|---|---|
| D00 | rGrUrUrUrUrArGrAmGmCmUmAmGmAmAmAmUmAmGmCrArArGrUrUrArArAr | 1210 |
| | ArUrArArGrGrCrUrArGrUrCrCrGrUrUrArUrCmAmAmCmUmUmGmAmAmAmAm | |
| | AmGmUmGmGmCmAmCmCmGmAmGmUmCmGmGmUmGmC | |
| D01 | rGrUrUrUrUrArGrArGrCrUrArGrArArArUrArGrCrArArGrUrUrArArArArUrArArGr | 1211 |
| | GrCrUrArGrUrCrCrGrUrUrArUrCrArArCrUrUrGrArArArArArGrUrGrGrCrArCrCrG | |
| | rArGrUrCrGrGrUrGrC | |
| D02 | rGrUrUrUrUrArGrAmGmCmUmAmGmAmAmAmUmAmGmCrArArGrUrUrArArAr | 1212 |
| | ArUrArArGrGrCrUrArGrUrCrCrGrUrUrArUrCrAmAmCmUmUmGmAmAmAmAm | |
| | AmGmUmGmGmCmAmCmCmGmAmGmUmCmGmGmUmGmC | |
| D03 | rGrUrUrUrUrAmGmAmGmCmUmAmGmAmAmAmUmAmGrCrArArGrUrUmArAr | 1213 |
| | ArArUrArArGmGrCrUmArGrUrCmCrGrUrUrArUrCrAmAmCmUmUmGmAmAmA | |
| | mAmAmGmUrGrGrCrAmCmCmGrArGrUrCrGmGmUmGmC | |
| D04 | rGrUrUrUrUrArGrAmGmCmUmAmGmAmAmAmUmAmGmCrArArGrUrUmArArA | 1214 |
| | rArUrArArGmGrCrUmArGrUrCmCrGrUrUrArUrCrAmAmCmUmUmGmAmAmAm | |
| | AmAmGmUrGrGrCrAmCmCmGrArGrUrCrGmGmUmGmC | |
| D05 | mGrUrUrUrUrAmGmAmGmCmUmAmGmAmAmAmUmAmGrCrArArGrUrUmArAr | 1215 |
| | ArArUrArArGmGrCrUmArGrUrCmCrGrUrUrArUrCrAmAmCmUmUmGmAmAmA | |
| | mAmAmGmUrGrGrCrAmCmCmGrArGrUrCrGmGmUmGmC | |
| D06 | mGrUrUrUrUrArGrAmGmCmUmAmGmAmAmAmUmAmGmCrArArGrUrUmArAr | 1216 |
| | ArArUrArArGmGrCrUmArGrUrCmCrGrUrUrArUrCrAmAmCmUmUmGmAmAmA | |
| | mAmAmGmUrGrGrCrAmCmCmGrArGrUrCrGmGmUmGmC | |
| D07 | rGrUrUrUrUrArGrAmGmCmUmAmGmAmAmAmUmAmGrCrArArGrUrUrArArArA | 1217 |
| | rUrArArGrGrCrUrArGrUrCrCrGrUrUrArUrCrArAmCmUmUmGmAmAmAmAmAm | |
| | GmUrGrGmCmAmCmCmGmAmGmUrCmGmGmUmGmC | |
| D08 | rGrUrUrUrUrArGrAmGmCmUmAmGmAmAmAmUmAmGrCrArArGrUrUrArArArA | 1218 |
| | rUrArArGrGrCrUrArGrUrCrCrGrUrUrArUrCrArAmCmUmUmGmAmAmAmAmAm | |
| | GmUmGrGmCmAmCmCmGmAmGmUmCmGmGmUmGmC | |
| D09 | mGrUrUrUrUrArGmAmGmCmUmAmGmAmAmAmUmAmGmCmAmArGrUrUmAr | 1219 |
| | AmArArUrAmAmGmGmCmUmArGrUmCmCrGrUrUrAmUmCrArAmCmUmUmGm | |
| | AmAmAmAmAmGmUmGrGmCmAmCmCmGmAmGmUmCmGmGmUmGmC | |
| D10 | rGrUrUrUrUrArGrAmGmCmUmAmGmAmAmAmUmAmGmCrArArGrUrUmArArA | 1220 |
| | rArUrArArGmGrCrUmArGrUrCmCrGrUrUrArUrCrArAmCmUmUmGmAmAmAmA | |
| | mAmGmUmGrGmCmAmCmCmGmAmGmUmCmGmGmUmGmC | |
| D11 | rGrUrUrUrUrArGrAmGmCmUmAmGmAmAmAmUmAmGrCrArArGrUrUmArArAr | 1221 |
| | ArUrArArGmGrCrUmArGrUrCmCrGrUrUrArUrCrArAmCmUmUmGmAmAmAmA | |
| | mAmGmUmGrGmCmAmCmCmGmAmGmUmCmGmGmUmGmC | |
| D12 | mGrUrUrUrUrArGrAmGmCmUmAmGmAmAmAmUmAmGmCrArArGrUrUmArAr | 1222 |
| | ArArUrArArGmGrCrUmArGrUrCmCrGrUrUrArUrCrArAmCmUmUmGmAmAmAm | |
| | AmAmGmUmGrGmCmAmCmCmGmAmGmUmCmGmGmUmGmC | |
| D13 | mGrUrUrUrUrArGrAmGmCmUmAmGmAmAmAmUmAmGrCrArArGrUrUmArArA | 1223 |
| | rArUrArArGmGrCrUmArGrUrCmCrGrUrUrArUrCrArAmCmUmUmGmAmAmAmA | |
| | mAmGmUmGrGmCmAmCmCmGmAmGmUmCmGmGmUmGmC | |
| D14 | rGrUrUrUrUrArGrAmGmCmUmAmGmAmAmAmUmAmGmCrArArGrUrUrArArAr | 1224 |
| | ArUrArArGrGrCrUrArGrUrCrCrGrUrUrArUrCrArAmCmUmUmGmAmAmAmAmA | |
| | mGrUrGmGmCmAmCmCmGmAmGmUmCmGmGmUmGmC | |
| D15 | rGrUrUrUrUrArGrArGmCmUmAmGmAmAmAmUmAmGrCrArArGrUrUrArArArAr | 1225 |
| | UrArArGrGrCrUrArGrUrCrCrGrUrUrArUrCmAmAmCmUmUmGmAmAmAmAmA | |
| | mGmUmGmGmCmAmCmCmGmAmGmUmCmGmGmUmGmC | |
| D16 | rGrUrUrUrUrArGrAmGmCmUmAmGmAmAmAmUmAmGmCrArArGrUrUrArArAr | 1226 |
| | ArUrArArGrGrCrUrArGrUrCrCrGrUrUrArUrCmAmAmCmUmUmGmAmAmAmAm | |
| | AmGmUmGmGmCmAmCmCmGrArGrUrCrGmGmUmGmC | |
| D17 | rGrUrUrUrUrArGrArGmCmUmAmGmAmAmAmUmAmGrCrArArGrUrUrArArArAr | 1227 |
| | UrArArGrGrCrUrArGrUrCrCrGrUrUrArUrCrArAmCmUmUmGmAmAmAmAmAm | |
| | GrUrGmGmCmAmCmCmGmAmGmUmCmGmGmUmGmC | |
| D18 | rGrUrUrUrUrArGrAmGmCmUmAmGmAmAmAmUmAmGmCrArArGrUrUrArArAr | 1228 |
| | ArUrArArGrGrCrUrArGrUrCrCrGrUrUrArUrCrArAmCmUmUmGmAmAmAmAmA | |
| | mGrUrGmGmCmAmCmCmGrArGrUrCrGmGmUmGmC | |
| D19 | rGrUrUrUrUrArGrArGmCmUmAmGmAmAmAmUmAmGrCrArArGrUrUrArArArAr | 1229 |
| | UrArArGrGrCrUrArGrUrCrCrGrUrUrArUrCrArAmCmUmUmGmAmAmAmAmAm | |
| | GrUrGmGmCmAmCmCmGrArGrUrCrGmGmUmGmC | |
| D20 | rGrUrUrUrUrArGrA/i2FG/mC/i2FU/mAmGmAmAmAmU/i2FA/mG/i2FC/rArArGrUr | 1230 |
| | UrArArArArUrArArGrGrCrUrArGrUrCrCrGrUrUrArUrC/i2FA/mA/i2FC/mU/i2FU/ | |
| | mGmAmAmA/i2FA/mA/i2FG/mU/i2FG/mG/i2FC/mA/i2FC/mC/i2FG/mAmGmU/i2FC/ | |
| | mG/i2FG/mU/i2FG/mC | |
| D21 | rGrUrUrUrUrArGrA/i2FG/mC/i2FU/mAmGmAmAmAmU/i2FA/mG/i2FC/rArArGrUr | 1231 |
| | UrArArArArUrArArGrGrCrUrArGrUrCrCrGrUrUrArUrC/i2FA/mA/i2FC/mU/i2FU/ | |
| | mGmAmAmA/i2FA/mA/i2FG/mU/i2FG/mG/i2FC/mA/i2FC/mC/i2FG//i2FA//12FG// | |
| | i2FU//i2FC/mG/i2FG/mU/i2FG/mC | |
| D26 | rGrUrUrUrUrArGrAmGmCmUmAmGmAmAmAmUmAmGrCrArArGrUrUrArArArA | 1232 |
| | rUrArArGrGrCrUrArGrUrCrCrGrUrUrArUrCrArAmCmUmUmGmAmAmAmAmAm | |
| | GrUrGmGrCrAmCmCmGrArGrUrCrGrGmUmGmC | |
| D27 | rGrUrUrUrUrArGrAmGmCmUmAmGmAmAmAmUmAmGrCrArArGrUrUrArArArA | 1233 |
| | rUrArArGmGmCrUrArGrUrCrCrGrUrUrArUrCrArAmCmUmUmGmAmAmAmAmA | |
| | mGrUrGmGrCrAmCmCmGrArGrUrCrGrGmUmGmC | |
| D28 | rGrUrUrUrUrArGrAmGmCmUmAmGmAmAmAmUmAmGrCrArArGrUrUrArArArA | 1234 |
| | rUrArArGrGrCrUrArGrUrCrCrGrUrUrArUrCrArAmCmUmUmGmAmAmArAmAmG | |
| | rUrGrGrCrArCmCrGrArGrUrCrGrGmUmGmC | |
| D29 | rGrUrUrUrUrArGrAmGmCmUmAmGmAmAmAmUmAmGrCrArArGrUrUrArArArA | 1235 |
| | rUrArArGmGmCrUrArGrUrCrCrGrUrUrArUrCrArAmCmUmUmGmAmAmArAmA | |
| | mGrUrGrGrCrArCmCrGrArGrUrCrGrGmUmGmC | |
| D30 | rGrUrUrUrUrArGrArGmCmUmAmGmAmAmAmUmAmGrCrArArGrUrUrArArArAr | 1236 |
| | UrArArGrGrCrUrArGrUrCrCrGrUrUrArUrCrArAmCmUmUmGmAmAmAmAmAm | |
| | GrUrGmGrCrAmCmCmGrArGrUrCrGrGmUmGmC | |
| D31 | rGrUrUrUrUrArGrArGmCmUmAmGmAmAmAmUmAmGrCrArArGrUrUrArArArAr | 1237 |
| | UrArArGmGmCrUrArGrUrCrCrGrUrUrArUrCrArAmCmUmUmGmAmAmAmAmA | |
| | mGrUrGmGrCrAmCmCmGrArGrUrCrGrGmUmGmC | |
| D32 | rGrUrUrUrUrArGrArGmCmUmAmGmAmAmAmUmAmGrCrArArGrUrUrArArArAr | 1238 |
| | UrArArGrGrCrUrArGrUrCrCrGrUrUrArUrCrArAmCmUmUmGmAmAmArAmAmGr | |
| | UrGrGrCrArCmCrGrArGrUrCrGrGmUmGmC | |
| D33 | rGrUrUrUrUrArGrArGmCmUmAmGmAmAmAmUmAmGrCrArArGrUrUrArArArAr | 1239 |
| | UrArArGmGmCrUrArGrUrCrCrGrUrUrArUrCrArAmCmUmUmGmAmAmArAmAm | |
| | GrUrGrGrCrArCmCrGrArGrUrCrGrGmUmGmC | |
| D34 | rGrUrUrUrUrArGrAmGmCmUmAmGmAmAmAmUmAmGrCrArArGrUrUrArArArA | 1240 |
| | rUrArArGrGrCrUrArGrUrCrCrGrUrUrArUrCrArAmCmUmUmGmAmArArAmArGr | |
| | UrGrGrCrArCmCrGrArGrUrCrGrGrUrGmC | |
| D35 | rGrUrUrUrUrArGrAmGmCmUmAmGmAmAmAmUmAmGrCrArArGrUrUrArArArA | 1241 |
| | rUrArArGmGmCrUrArGrUrCrCrGrUrUrArUrCrArAmCmUmUmGmAmArArAmArG | |
| | rUrGrGrCrArCmCrGrArGrUrCrGrGrUrGmC | |
| d00_seq1 | rGrUrUrUrUrArGrAmGmCmUmAmGmAmAmAmUmAmGmCrArArGrUrUrArArAr | 1242 |
| | ArUrArArGrGrCrUrArGrUrCrCrGrUrUrCrUrCmAmAmCmGmGmAmAmAmCmCm | |
| | GmUmGmGmCmAmCmCmGmAmGmUmCmGmGmUmGmC | |
| d00_seq2 | rGrUrUrUrUrGrGrAmCmCmUmAmGmAmAmAmUmAmGmGrArCrGrUrCrArArAr | 1243 |
| | ArUrArArGrCrCrUrArGrUrGrCrGrUrGrCrUrCmAmAmCmCmUmGmAmAmAmUm | |
| | GmGmUmGmGmCmAmCmCmGmAmGmUmCmGmGmUmGmC | |
| d00_seq3 | rGrUrUrUrUrArGrCmGmCmCmAmAmAmAmAmAmGmGmCrArArGrUrUrArArAr | 1244 |
| | ArUrArArGrGrCrGrArGrUrCrCrGrCrCrArCrCmAmAmCmCmUmGmAmAmAmCm | |
| | GmGmUmGmGmCmAmCmCmGmAmGmUmCmGmGmUmGmC | |
| d00_seq4 | rGrUrUrUrUrArGrCmGmCmCmAmAmAmAmAmAmAmGmCrArArGrUrUrArArAr | 1245 |
| | ArUrArArGrGrCrGrArGrUrCrCrGrCrUrArUrCmAmAmCmCmUmGmAmAmAmCm | |
| | GmGmUmGmGmCmAmCmCmGmAmGmUmCmGmGmUmGmC | |
| d00_seq5 | rGrUrUrUrUrArUrAmGmCmUmAmGmCmAmAmUmAmGmCrArArGrUrUrArArAr | 1246 |
| | ArUrArArGrGrCrUrArGrUrCrCrGrUrUrArUrGmAmAmCmGmUmGmAmAmAmCm | |
| | CmGmUmGmGmCmAmCmCmGmAmGmUmCmGmGmUmGmC | |
| d00_seq6 | rGrUrUrUrUrArCrAmGmCmUmAmGmAmGmAmUmAmGmCrArArGrUrUrArArAr | 1247 |
| | ArUrArArGrGrCrUrArGrUrUrCrGrUrUrArCrCmAmAmCmGmAmGmAmAmCmAm | |
| | CmGmUmGmGmCmAmCmCmGmAmGmUmCmGmGmUmGmC | |
| d00_seq7 | rGrUrArUrUrCrGrAmGmUmCmAmGmAmAmAmUmGmGmCrArCrGrUrGrArArUr | 1248 |
| | ArUrArArGrArCrUrArGrUrUrCrGrUrArCrUrCmAmAmCmUmGmGmCmAmAmGm | |
| | CmGmUmGmGmCmAmCmCmGmAmGmUmCmGmGmUmGmC | |
| N1_D00 | rGrUrUrUrUrArGrAmGmCmUmGmGmAmAmAmCmAmGmCrArArGrUrUrArArAr | 1249 |
| | ArUrArArGrGrCrUrArGrUrCrCrGrUrUrArUrCmAmAmCmUmUmGmAmAmAmAm | |
| | AmGmUmGmGmCmAmCmCmGmAmGmUmCmGmGmUmGmC | |
| N2_D00 | rGrUrUrUrUrArGrAmGmCmUmGmAmGmAmAmAmUmCmArGrCrArArGrUrUrAr | 1250 |
| | ArArArUrArArGrGrCrUrArGrUrCrCrGrUrUrAmUmCmAmAmCmUmUmGmAmAm | |
| | AmAmAmGmUmGmGmCmAmCmCmGmAmGmUmCmGmGmUrGrC | |
| N3_D00 | rGrUrUrUrUrArGrAmGmCmUmAmGmAmAmAmUmAmGmCrArArGrUrUrArArAr | 1251 |
| | ArUrArArGrGrCrUrArGrUrCrCrGrUrUrArUrCmAmAmCmUmGmUmGmAmAmAm | |
| | AmCmAmGmUmGmGmCmAmCmCmGmAmGmUmCmGmGmUrGrC | |
| N4_D00 | rGrUrUrUrUrArGrAmGmCmUmAmGmAmAmAmUmAmGmCrArArGrUrUrArArAr | 1252 |
| | ArUrArArGrGrCrUrArGrUrCrCrGrUrUrArUrCmAmAmCmUmGmGmUmGmAmAm | |
| | AmAmCmCmAmGmUmGmGmCmAmCmCmGmAmGmUmCmGrGrUrGrC | |
| N5_D00 | rGrUrUrUrUrArGrAmGmCmUmGmAmGmAmAmAmUmCmArGrCrArArGrUrUrAr | 1253 |
| | ArArArUrArArGrGrCrUrArGrUrCrCrGrUrUrAmUmCmAmAmCmUmGmUmGmAm | |
| | AmAmAmCmAmGmUmGmGmCmAmCmCmGmAmGmUmCmGrGrUrGrC | |
| N6_D00 | rGrUrUrUrUrArGrAmGmCmUmGmGmAmAmAmCmAmGmCrArArGrUrUrArArAr | 1254 |
| | ArUrArArGrGrCrUrArGrUrCrCrGrUrUrArUrCmAmAmCmUmGmUmGmAmAmAm | |
| | AmCmAmGmUmGmGmCmAmCmCmGmAmGmUmCmGmGmUrGrC | |
| PG1 | rGrUrUrUrUrArGrAmGmCmUmAmGmAmAmAmUmAmGmCrArArGrUrUrArArAr | 1255 |
| | ArUrArArGrGrCrUrArGrUrCrCrGrUrUrArUrCmAmAmCmUmGmUmGmAmAmAm | |
| | AmCmAmGmUmGmGmCmAmCmCmGmAmGmUmCmGmGmUmGmC | |
| PG2 | rGrUrUrUrUrArGrAmGmCmUmAmGmAmAmAmUmAmGrCrArArGrUrUrArArArA | 1256 |
| | rUrArArGrGrCrUrArGrUrCrCrGrUrUrArUrCrArAmCmUmGmUmGmAmAmAmAm | |
| | CmAmGmUrGrGmCmAmCmCmGmAmGmUrCmGmGmUmGmC | |
| PG3 | rGrUrUrUrUrArGrAmGmCmUmAmGmAmAmAmUmAmGrCrArArGrUrUmArArAr | 1257 |
| | ArUrArArGmGrCrUmArGrUrCmCrGrUrUrArUrCrArAmCmUmGmUmGmAmAmA | |
| | mAmCmAmGmUmGrGmCmAmCmCmGmAmGmUmCmGmGmUmGmC | |
| PG4 | rGrUrUrUrUrArGrAmGmCmUmAmGmAmAmAmUmAmGmCrArArGrUrUrArArAr | 1258 |
| | ArUrArArGrGrCrUrArGrUrCrCrGrUrUrArUrCrArAmCmUmGmUmGmAmAmAmA | |
| | mCmAmGrUrGmGmCmAmCmCmGrArGrUrCrGmGmUmGmC | |
| PG5 | rGrUrUrUrUrArGrArGmCmUmAmGmAmAmAmUmAmGrCrArArGrUrUrArArArAr | 1259 |
| | UrArArGrGrCrUrArGrUrCrCrGrUrUrArUrCrArAmCmUmGmUmGmAmAmAmAm | |
| | CmAmGrUrGmGmCmAmCmCmGrArGrUrCrGmGmUmGmC | |
| PG6 | rGrUrUrUrUrArGrAmGmCmUmAmGmAmAmAmUmAmGrCrArArGrUrUrArArArA | 1260 |
| | rUrArArGrGrCrUrArGrUrCrCrGrUrUrArUrCrArAmCmUmGmUmGmAmAmAmAm | |
| | CmAmGrUrGmGrCrAmCmCmGrArGrUrCrGrGmUmGmC | |
| PG7 | rGrUrUrUrUrArGrAmGmCmUmAmGmAmAmAmUmAmGrCrArArGrUrUrArArArA | 1261 |
| | rUrArArGmGmCrUrArGrUrCrCrGrUrUrArUrCrArAmCmUmGmUmGmAmAmAmA | |
| | mCmAmGrUrGmGrCrAmCmCmGrArGrUrCrGrGmUmGmC | |
| PG8 | rGrUrUrUrUrArGrAmGmCmUmAmGmAmAmAmUmAmGrCrArArGrUrUrArArArA | 1262 |
| | rUrArArGrGrCrUrArGrUrCrCrGrUrUrArUrCrArAmCmUmGmUmGmAmAmArAmC | |
| | mAmGrUrGrGrCrArCmCrGrArGrUrCrGrGmUmGmC | |
| PG9 | rGrUrUrUrUrArGrArGmCmUmAmGmAmAmAmUmAmGrCrArArGrUrUrArArArAr | 1263 |
| | UrArArGmGmCrUrArGrUrCrCrGrUrUrArUrCrArAmCmUmGmUmGmAmAmAmA | |
| | mCmAmGrUrGmGrCrAmCmCmGrArGrUrCrGrGmUmGmC | |
| PG10 | rGrUrUrUrUrArGrArGmCmUmAmGmAmAmAmUmAmGrCrArArGrUrUrArArArAr | 1264 |
| | UrArArGmGmCrUrArGrUrCrCrGrUrUrArUrCrArAmCmUmGmUmGmAmAmArAm | |
| | CmAmGrUrGrGrCrArCmCrGrArGrUrCrGrGmUmGmC | |
| PG11 | rGrUrUrUrUrArGrAmGmCmUmAmGmAmAmAmUmAmGrCrArArGrUrUrArArArA | 1265 |
| | rUrArArGrGrCrUrArGrUrCrCrGrUrUrArUrCrArAmCmUmGmUmGmAmArArAmC | |
| | mArGrUrGrGrCrArCmCrGrArGrUrCrGrGrUrGmC | |
| PG12 | rGrUrUrUrUrArGrAmGmCmUmAmGmAmAmAmUmAmGrCrArArGrUrUrArArArA | 1266 |
| | rUrArArGmGmCrUrArGrUrCrCrGrUrUrArUrCrArAmCmUmGmUmGmAmArArAm | |
| | CmArGrUrGrGrCrArCmCrGrArGrUrCrGrGrUrGmC | |

¹For RNA, T is U; U are T in the sequence listing.
²For the sequences: *, phosphorothioate modification; mN, 2′O-methyl modification; rN, unmodified ribonucleotide; i2FN, Int Fluoro modification. N = A, C, T/U, G.

[0339] The benchmark scaffold was design DOO. In the experiment of FIG. 49, the scaffold variants were tested with a Wilson's disease tagRNA in Huh7 H1069Q cells. The tagRNA was transfected at a limiting dose (0.63 ng) to identify scaffold sequences with higher potency. Many scaffold variants outperformed the benchmark DOO (FIG. 49).

[0340] Next, twelve more SpyCas9 scaffold variants were designed and compared to the top sequences from the first set. The benchmark scaffold was design DOO. In this experiment (FIG. 50), the scaffold variants were tested in a Wilson's disease tagRNA in Huh7 H1069Q cells. Many scaffold variants outperformed the benchmark DOO.

[0341] Finally, modifications to the egRNA scaffold were tested. SpyCas9 scaffold variants were designed with different sequences and different chemical modification patterns. The benchmark scaffold was design DOO. In this experiment, the scaffold variants were tested in a Wilson's disease egRNA in Huh7 H1069Q cells. The egRNA was transfected at a limiting dose (0.2 ng) to identify scaffold sequences with higher potency. As shown in FIG. 51, many scaffold variants outperformed the benchmark DOO.

[0342] In at least some of the previously described embodiments, one or more elements used in an embodiment can interchangeably be used in another embodiment unless such a replacement is not technically feasible. It will be appreciated by those skilled in the art that various other omissions, additions and modifications may be made to the methods and structures described above without departing from the scope of the claimed subject matter. All such modifications and changes are intended to fall within the scope of the subject matter, as defined by the appended claims.

[0343] With respect to the use of substantially any plural and/or singular terms herein, those having skill in the art can translate from the plural to the singular and/or from the singular to the plural as is appropriate to the context and/or application. The various singular/plural permutations may be expressly set forth herein for sake of clarity. As used in this specification and the appended claims, the singular forms “a,” “an,” and “the” include plural references unless the context clearly dictates otherwise. Any reference to “or” herein is intended to encompass “and/or” unless otherwise stated.

[0344] It will be understood by those within the art that, in general, terms used herein, and especially in the appended claims (e.g., bodies of the appended claims) are generally intended as “open” terms (e.g., the term “including” should be interpreted as “including but not limited to,” the term “having” should be interpreted as “having at least,” the term “includes” should be interpreted as “includes but is not limited to,” etc.). It will be further understood by those within the art that if a specific number of an introduced claim recitation is intended, such an intent will be explicitly recited in the claim, and in the absence of such recitation no such intent is present. For example, as an aid to understanding, the following appended claims may contain usage of the introductory phrases “at least one” and “one or more” to introduce claim recitations. However, the use of such phrases should not be construed to imply that the introduction of a claim recitation by the indefinite articles “a” or “an” limits any particular claim containing such introduced claim recitation to embodiments containing only one such recitation, even when the same claim includes the introductory phrases “one or more” or “at least one” and indefinite articles such as “a” or “an” (e.g., “a” and/or “an” should be interpreted to mean “at least one” or “one or more”); the same holds true for the use of definite articles used to introduce claim recitations. In addition, even if a specific number of an introduced claim recitation is explicitly recited, those skilled in the art will recognize that such recitation should be interpreted to mean at least the recited number (e.g., the bare recitation of “two recitations,” without other modifiers, means at least two recitations, or two or more recitations). Furthermore, in those instances where a convention analogous to “at least one of A, B, and C, etc.” is used, in general such a construction is intended in the sense one having skill in the art would understand the convention (e.g., “a system having at least one of A, B, and C” would include but not be limited to systems that have A alone, B alone, C alone, A and B together, A and C together, B and C together, and/or A, B, and C together, etc.). In those instances where a convention analogous to “at least one of A, B, or C, etc.” is used, in general such a construction is intended in the sense one having skill in the art would understand the convention (e.g., “a system having at least one of A, B, or C” would include but not be limited to systems that have A alone, B alone, C alone, A and B together, A and C together, B and C together, and/or A, B, and C together, etc.). It will be further understood by those within the art that virtually any disjunctive word and/or phrase presenting two or more alternative terms, whether in the description, claims, or drawings, should be understood to contemplate the possibilities of including one of the terms, either of the terms, or both terms.

[0345] In addition, where features or aspects of the disclosure are described in terms of Markush groups, those skilled in the art will recognize that the disclosure is also thereby described in terms of any individual member or subgroup of members of the Markush group.

[0346] As will be understood by one skilled in the art, for any and all purposes, such as in terms of providing a written description, all ranges disclosed herein also encompass any and all possible sub-ranges and combinations of sub-ranges thereof. Any listed range can be easily recognized as sufficiently describing and enabling the same range being broken down into at least equal halves, thirds, quarters, fifths, tenths, etc. As a non-limiting example, each range discussed herein can be readily broken down into a lower third, middle third and upper third, etc. As will also be understood by one skilled in the art all language such as “up to,” “at least,” “greater than,” “less than,” and the like include the number recited and refer to ranges which can be subsequently broken down into sub-ranges as discussed above. Finally, as will be understood by one skilled in the art, a range includes each individual member. Thus, for example, a group having 1-3 articles refers to groups having 1, 2, or 3 articles. Similarly, a group having 1-5 articles refers to groups having 1, 2, 3, 4, or 5 articles, and so forth.

[0347] While various aspects and embodiments have been disclosed herein, other aspects and embodiments will be apparent to those skilled in the art. The various aspects and embodiments disclosed herein are for purposes of illustration and are not intended to be limiting, with the true scope and spirit being indicated by the following claims.

What is claimed is:

1. A reverse transcriptase (RT) editing system comprising:
a fusion protein comprising a Cas9 nickase and a reverse transcriptase, and
a template armed guide RNA (tagRNA) comprising from 5′ to 3′ a spacer sequence, a scaffold sequence, an editing template and a flap binding sequence.

2. The RT editing system of claim 1, wherein the RT editing system further comprises an enhancer guide RNA (egRNA).

3. A reverse transcriptase (RT) editor comprising:
a DNA binding domain, a DNA endonuclease domain and a DNA polymerase domain,
wherein the DNA polymerase domain, the DNA binding domain, and the DNA endonuclease domain are fused or linked to form a fusion protein,
wherein the DNA polymerase domain comprises a reverse transcriptase, optionally a reverse transcriptase comprising an amino acid sequence that is at least 80% identical to any one of SEQ ID NOs: 141, 250-269, 315-319, 899-909, and 1015-1018, optionally an amino acid sequence having one, two, three, four, or five mismatches relative to the sequence of any one of SEQ ID NOs: 141, 250-269, 315-319, 899-909, and 1015-1018, and
wherein the DNA endonuclease domain comprises a Cas9 nickase, optionally a Cas9 nickase comprising an amino acid sequence that is at least 80% identical to any one of SEQ ID NOs: 142-163 and 270-314, optionally an amino acid sequence having one, two, three, four, or five mismatches relative to the sequence of any one of SEQ ID NOs: 142-163 and 270-314.

4. A template armed guide RNA (tagRNA) comprising:
a spacer that is complementary to a search target sequence on a first strand of a double stranded target DNA;
an editing template that comprises a region of complementarity to an editing target sequence on a second strand of the double stranded target DNA; and
a scaffold sequence that associates with a reverse transcriptase (RT) editor comprising a DNA binding domain, a DNA endonuclease domain and a DNA polymerase domain, and
wherein the first strand and the second strand are complementary to each other.

5. The tagRNA of claim 4, wherein the tagRNA comprises a flap binding sequence at least partially complementary to the spacer.

6. The tagRNA of any one of claims 4-5, wherein the scaffold sequence is between the spacer and the editing template.

7. The tagRNA of any one of claims 5-6, comprising from 5′ to 3′: the spacer, the scaffold sequence, the editing template, and the flap binding sequence.

8. The tagRNA of any one of claims 5-7, wherein the spacer, the scaffold sequence, the editing template, and the flap binding sequence form a contiguous sequence in a single molecule.

9. The tagRNA of any one of claims 4-8, wherein the editing template comprises an intended nucleotide edit compared to the double stranded target DNA.

10. The tagRNA of claim 9, wherein the tagRNA guides the RT editor to incorporate the intended nucleotide edit into the double stranded target DNA when the tagRNA is contacted with the double stranded target DNA.

11. The tagRNA of any one of claims 9-10, wherein the RT editor synthesizes a single stranded DNA encoded by the editing template, wherein the single stranded DNA replaces the editing target sequence and results in incorporation of the intended nucleotide edit into a region corresponding to the editing target in the double stranded target DNA.

12. The tagRNA of any one of claims 4-11, wherein the search target sequence is complementary to a protospacer sequence in the double stranded target DNA, and wherein the protospacer sequence is adjacent to a protospacer adjacent motif (PAM) in the double stranded target DNA.

13. The tagRNA of claim 12, wherein the tagRNA results in incorporation of a nucleotide edit in the PAM when contacted with the double stranded target DNA.

14. The tagRNA of any one of claims 4-13, wherein the spacer of the tagRNA is from 16 to 25 nucleotides in length, optionally 20 nucleotides in length or 21-23 nucleotides in length.

15. The tagRNA of any one of claims 5-14, wherein the flap binding sequence is about 2 to 20 nucleotides in length, optionally about 8 to 16 nucleotides in length or 6 nucleotides in length.

16. The tagRNA of any one of claims 4-15, wherein the editing template is about 4 to 30 nucleotides in length, optionally about 10 to 30 nucleotides in length, further optionally 6 to 9 nucleotides in length.

17. The tagRNA of any one of claims 9-16, wherein the tagRNA results in incorporation of the intended nucleotide edit about 0 to 30 base pairs downstream of the nickase cleavage site.

18. The tagRNA of any one of claims 9-17, wherein the intended nucleotide edit comprises a single nucleotide substitution compared to the region corresponding to the editing target in the double stranded target DNA, optionally, the single nucleotide substitution is a T>G or T>C substitution.

19. The tagRNA of any one of claims 9-18, wherein the intended nucleotide edit comprises an insertion compared to the region corresponding to the editing target in the double stranded target DNA, optionally an insertion of a nucleotide sequence at least 50, at least 45, at least 40, at least 35, at least 30, at least 25, at least 20, at least 15, at least 10, or at least 5, nucleotides in length.

20. The tagRNA of any one of claims 9-19, wherein the intended nucleotide edit comprises a deletion compared to the region corresponding to the editing target in the double stranded target DNA.

21. The tagRNA of any one of claims 4-20, wherein the editing template comprises one or more silent nucleotide edits compared to the region corresponding to the editing target in the double stranded target DNA, optionally said silent nucleotide edits do not alter the amino acid sequence of the protein encoded by the double stranded target DNA, further optionally said one or more silent nucleotide edits comprise a substitution of 2 to 5 contiguous nucleotides.

22. The tagRNA of any one of claims 4-21, wherein the editing template comprises a wild type double stranded target DNA sequence.

23. The tagRNA of claim 22, wherein the tagRNA results in correction of a mutation when contacted with the double stranded target DNA.

24. The tagRNA of any one of claims 4-23, wherein the tagRNA comprises any one of the sequences of SEQ ID NOs: 16-47, 99-130, 164-181, 320-497, 563-682, 791-792, 1046-1053, and 1089-1203 or a sequence that exhibits at least about 85% identity to any one of the sequences of SEQ ID NOs: 16-47, 99-130, 164-181, 320-497, 563-682, 791-792, 1046-1053, and 1089-1203.

25. The tagRNA of any one of claims 4-24, further comprising:
3′ mN*mN*mN*N and 5′ mN*mN*mN* modifications, where m indicates that the nucleotide contains a 2′-O-Me modification and a * indicates the presence of a phosphorothioate bond; and/or
a structural motif at the 3′ terminus selected from the group consisting of: an inverted-dT, a prequeosine1-1 riboswitch aptamer (evopreQ1) and variants thereof, a frameshifting pseudoknot from Moloney murine leukemia virus (MMLV) (mpknot), G-quadruplexes, hairpin structures, xrRNA, and a P4-P6 domain of the group I intron; optionally, the structural motif is evopreQ1 or a variant thereof comprising a nucleotide sequence selected from SEQ ID NOs: 84-90.

26. A reverse transcriptase (RT) editing system comprising:
a template armed guide RNA (tagRNA), or a nucleic acid encoding the tagRNA, wherein the tagRNA comprises:
a spacer that is complementary to a search target sequence on a first strand of a nucleic acid molecule;
an editing template that comprises a region of complementarity to an editing target sequence on a second strand of the nucleic acid molecule; and
a scaffold sequence that associates with a reverse transcriptase (RT) editor comprising a DNA binding domain, a DNA endonuclease domain and a DNA polymerase domain; and
a reverse transcriptase (RT) editor comprising a DNA binding domain, a DNA endonuclease domain and a DNA polymerase domain, or a nucleic acid encoding the RT editor,
wherein the DNA polymerase domain comprises a reverse transcriptase, optionally a reverse transcriptase comprising an amino acid sequence that is at least 80% identical to any one of SEQ ID NOs: 141, 250-269, 315-319, 899-909, and 1015-1018, optionally an amino acid sequence having one, two, three, four, or five mismatches relative to the sequence of any one of SEQ ID NOs: 141, 250-269, 315-319, 899-909, and 1015-1018, and
wherein the DNA endonuclease domain comprises a Cas9 nickase, optionally a Cas9 nickase comprising an amino acid sequence that is at least 80% identical to any one of SEQ ID NOs: 142-163 and 270-314, optionally an amino acid sequence having one, two, three, four, or five mismatches relative to the sequence of any one of SEQ ID NOs: 142-163 and 270-314.

27. A reverse transcriptase (RT) editing system comprising:
the tagRNA according to any one of claims 4-25, or a nucleic acid encoding the tagRNA; and
a reverse transcriptase (RT) editor comprising a DNA binding domain, a DNA endonuclease domain and a DNA polymerase domain, or a nucleic acid encoding the RT editor.

28. The RT editing system of any one of claims 26-27, further comprising: an enhancer guide RNA (egRNA), or a nucleic acid encoding the egRNA, wherein the egRNA comprises a egRNA spacer that is complementary to a second search target sequence in the double stranded target DNA, optionally the egRNA comprises a scaffold sequence.

29. The RT editing system of claim 28, wherein the second search target sequence is on the second strand of the double stranded target DNA.

30. The RT editing system of any one of claims 28-29, wherein the egRNA spacer is from 16 to 22 nucleotides in length, optionally 20 nucleotides in length.

31. The RT editing system of any one of claims 26-30, wherein the intended nucleotide edit incorporation rate of the RT editing system is greater than at least about 30%, about 40%, about 50%, about 60%, about 70%, or about 80%.

32. A reverse transcriptase (RT) editing complex comprising:
template armed guide RNA (tagRNA) comprising:
a spacer that is complementary to a search target sequence on a first strand of a nucleic acid molecule;
an editing template that comprises a region of complementarity to an editing target sequence on a second strand of the nucleic acid molecule; and
a scaffold sequence that associates with a reverse transcriptase (RT) editor comprising a DNA binding domain, a DNA endonuclease domain and a DNA polymerase domain; and
a reverse transcriptase (RT) editor comprising a DNA binding domain, a DNA endonuclease domain and a DNA polymerase domain, or a nucleic acid encoding the RT editor,
wherein the DNA polymerase domain comprises a reverse transcriptase, optionally a reverse transcriptase comprising an amino acid sequence that is at least 80% identical to any one of SEQ ID NOs: 141, 250-269, 315-319, 899-909, and 1015-1018, optionally an amino acid sequence having one, two, three, four, or five mismatches relative to the sequence of any one of SEQ ID NOs: 141, 250-269, 315-319, 899-909, and 1015-1018, and
wherein the DNA endonuclease domain comprises a Cas9 nickase, optionally a Cas9 nickase comprising an amino acid sequence that is at least 80% identical to any one of SEQ ID NOs: 142-163 and 270-314, optionally an amino acid sequence having one, two, three, four, or five mismatches relative to the sequence of any one of SEQ ID NOs: 142-163 and 270-314.

33. A reverse transcriptase (RT) editing complex comprising:
(i) the tagRNA of any one of claims 4-25 and a reverse transcriptase (RT) editor comprising a DNA binding domain, a DNA endonuclease domain and a DNA polymerase domain; or
(ii) the RT editing system of any one of claims 26-31.

34. The RT editing complex of any one of claims 32-33, wherein the intended nucleotide edit incorporation rate of the RT editing complex is greater than at least about 30%, about 40%, about 50%, about 60%, about 70%, or about 80%.

35. The RT editor, the tagRNA, the RT editing system, or the RT editing complex of any one of claims 1-34, wherein the DNA endonuclease domain is a CRISPR associated (Cas) protein domain.

36. The RT editor, the tagRNA, the RT editing system, or the RT editing complex of claim 35, wherein the Cas protein domain has nickase activity.

37. The RT editor, the tagRNA, the RT editing system, or the RT editing complex of any one of claims 35-36, wherein the Cas protein domain is a Cas9.

38. The RT editor, the tagRNA, the RT editing system, or the RT editing complex of claim 37, wherein the Cas9 comprises a mutation in an HNH domain.

39. The RT editor, the tagRNA, the RT editing system, or the RT editing complex of any one of claims 37-38, wherein the Cas9 comprises an H840A mutation in the HNH domain.

40. The RT editor, the tagRNA, the RT editing system, or the RT editing complex of any one of claims 35-36, wherein the Cas protein domain is a Cas12b.

41. The RT editor, the tagRNA, the RT editing system, or the RT editing complex of any one of claims 35-36, wherein the Cas protein domain is a Cas12a, Cas12b, Cas12c, Cas12d, Cas12e, Cas14a, Cas14b, Cas14c, Cas14d, Cas14e, Cas14f, Cas14g, Cas14h, Cas14u, Casϕ, Ssch1Cas9, Sro1Cas9, Sha4Cas9, SsuCas9, iSpyMacCas9, Ssi5Cas9, Ssi8Cas9, Ssci4Cas9, Shy1Cas9, Sag3Cas9, Slutr1Cas9, Ssch3Cas9, SpRYCas9, SpRYcCas9, Sma2Cas9, SsaCas9, EvoCjCas9, or iSpyMac.

42. The RT editor, the tagRNA, the RT editing system, or the RT editing complex of any one of claims 1-41, wherein the DNA polymerase domain is a reverse transcriptase, optionally the editing template is a reverse transcription template.

43. The RT editor, the tagRNA, the RT editing system, or the RT editing complex of claim 42, wherein the reverse transcriptase is a retrovirus reverse transcriptase.

44. The RT editor, the tagRNA, the RT editing system, or the RT editing complex of any one of claims 42-43, wherein the reverse transcriptase is a Moloney murine leukemia virus (MMLV) reverse transcriptase.

45. The RT editor, the tagRNA, the RT editing system, or the RT editing complex of any one of claims 1-44, wherein the DNA polymerase domain and the DNA binding domain, a DNA endonuclease domain are fused or linked to form a fusion protein.

46. The RT editor, the tagRNA, the RT editing system, or the RT editing complex of claim 45, wherein:
the DNA polymerase domain comprises a reverse transcriptase, optionally a reverse transcriptase comprising an amino acid sequence that is at least 80% identical to any one of SEQ ID NOs: 141, 250-269, 315-319, 899-909, and 1015-1018, optionally an amino acid sequence having one, two, three, four, or five mismatches relative to the sequence of any one of SEQ ID NOs: 141, 250-269, 315-319, 899-909, and 1015-1018; and/or
the DNA endonuclease domain comprises a Cas9 nickase, optionally a Cas9 nickase comprising an amino acid sequence that is at least 80% identical to any one of SEQ ID NOs: 142-163 and 270-314, optionally an amino acid sequence having one, two, three, four, or five mismatches relative to the sequence of any one of SEQ ID NOs: 142-163 and 270-314.

47. The RT editor, the tagRNA, the RT editing system, or the RT editing complex of any one of claims 1-46, wherein the editing template comprises: (i) at least 1, 2, 3, 4, 5, 6, 7, 8, 9, 10, 11, 12, 13, or 14 2′ O-methyl RNA base(s); and/or (ii) at least 1, 2, 3, 4, 5, 6, 7, 8, 9, 10, 11, 12, 13, or 14 2′ Fluoro RNA base(s).

48. The RT editor, the tagRNA, the RT editing system, or the RT editing complex of any one of claims 1-47, wherein the FBS comprises: (i) at least 1, 2, 3, 4, 5, 6, 7, or 8 2′ O-methyl RNA base(s); and/or (ii) at least 1, 2, 3, 4, 5, 6, 7, or 8 2′ Fluoro RNA base(s).

49. The RT editor, the tagRNA, the RT editing system, or the RT editing complex of any one of claims 1-48, wherein the scaffold sequence comprises a nucleotide sequence that is at least 80% identical to any one of SEQ ID NOs: 683-718, 894-898, and 964-1014, optionally a nucleotide sequence having one, two, three, four, or five mismatches relative to the sequence of any one of SEQ ID NOs: 683-718, 894-898, and 964-1014.

50. The RT editor, the tagRNA, the RT editing system, or the RT editing complex of any one of claims 1-49, wherein the scaffold sequence comprises one or more nucleotide substitutions, insertions, and/or deletions at one or more nucleotide positions relative to the parental scaffold sequence of SEQ ID NO: 683, optionally:
dinucleotide substitutions at nucleotide positions 5-6 and 34-35, optionally configured such that the nucleotide sequence at positions 5-6 is complementary to the nucleotide sequence at positions 34-35;
a deletion at nucleotide positions 55-87, 57-87, 59-87, 61-87, or 63-87;
a substitution at one or more of nucleotide positions 17, 18, 19, and 20, optionally a UUCG substitution at nucleotide positions 17-20;
a deletion at nucleotide positions 14-16 and 21-24;
a replacement of nucleotides at nucleotide positions 11-28 with GUUCGC; and/or
a deletion at nucleotide positions 12-16 and 21-26.

51. The RT editor, the tagRNA, the RT editing system, or the RT editing complex of any one of claims 1-50, wherein the scaffold sequence comprises one or more modifications and/or one or more nucleotide substitutions, insertions, and/or deletions at one or more nucleotide positions relative to the parental scaffold sequence of SEQ ID NO: 700, optionally:
a substitution at one or more of nucleotide positions 13, 18, 21, 40, 50, and 52-53, further optionally:
a U-to-C substitution at nucleotide position 13;
an A-to-G substitution at nucleotide position 18;
an A-to-C or an A-to-U substitution at nucleotide position 21;
a C-to-U or a C-to-A or a C-to-G substitution at nucleotide position 40;
a U-to-C or a U-to-A or a U-to-G substitution at nucleotide position 50;
an A-to-C or an A-to-U or an A-to-G substitution at nucleotide position 52;
and/or
an A-to-C or an A-to-U or an A-to-G substitution at nucleotide position 53;
the one or more modifications comprise nucleoside modification(s), sugar modification(s), modified internucleoside linkage(s), and/or backbone modification(s), optionally the scaffold sequence comprises (i) a 2′ O-methyl modification at one or more of nucleotide positions 1, 3-9, 12-27, 29-32, 36-38, 40, 44-45, 49-50, and 52-53, and/or (ii) a 2′-fluoro modification at one or more of nucleotide positions 1-4, 6, 8, 10-11, 20, 22-32, 35-38, 40-46, and 49-51; and/or
the scaffold sequence comprises any one of the sequences of SEQ ID NOs: 894-898 and 964-1014, or a sequence that exhibits at least about 85% identity to any one of the sequences of SEQ ID NOs: 894-898 and 964-1014.

52. The RT editor, the tagRNA, the RT editing system, or the RT editing complex of any one of claims 1-51, wherein the scaffold sequence of the tagRNA, the scaffold sequence of the egRNA, or both, comprises the sequence of any one of SEQ ID NOs: 1210-1266 or a sequence that exhibits at least about 85% identity to any one of SEQ ID NOs: 1210-1266.

53. The RT editor, the tagRNA, the RT editing system, or the RT editing complex of any one of claims 3-52, wherein:
the DNA polymerase domain comprises a reverse transcriptase, optionally a reverse transcriptase comprising one or more mutations, wherein at least one of the one or more mutations is at an amino acid position functionally equivalent to V101, N200, A208, G248, P330, L435, K445, and/or A623 relative to SEQ ID NO: 8.

54. The RT editor, the tagRNA, the RT editing system, or the RT editing complex of any one of claims 3-52, wherein:
the DNA polymerase domain comprises a reverse transcriptase comprising an amino acid sequence that is at least 80% identical to SEQ ID NO: 255, optionally the reverse transcriptase comprises one or more mutations,
optionally at least one of the one or more mutations is at amino acid position V98, N197, A205, S245, P327, V432, R442, and/or A623 relative to SEQ ID NO: 255,
further optionally the reverse transcriptase comprises one or more transition mutations selected from the group consisting of V98R, N197C, N197D, N197G, A205T, S245C, P327E, P327Q, V432K, R442T, and A623F relative to SEQ ID NO: 255.

55. The RT editor, the tagRNA, the RT editing system, or the RT editing complex of any one of claims 3-52, wherein:
the DNA polymerase domain comprises a reverse transcriptase comprising an amino acid sequence that is at least 80% identical to SEQ ID NO: 260, optionally the reverse transcriptase comprises one or more mutations,
optionally at least one of the one or more mutations is at amino acid position V106, N204, E212, G252, P334, L440, E450, and/or A629 relative to SEQ ID NO: 260,
further optionally the reverse transcriptase comprises one or more transition mutations selected from the group consisting of V106R, N204C, N204D, N204G, E212T, G252C, P334E, P334Q, L440K, E450T, and A629F relative to SEQ ID NO: 260.

56. The RT editor, the tagRNA, the RT editing system, or the RT editing complex of any one of claims 3-52, wherein the DNA polymerase domain:
comprises a reverse transcriptase comprising an amino acid sequence that is at least 80% identical to SEQ ID NO: 255, and wherein the reverse transcriptase comprises an N197C and/or V98R transition mutation relative to SEQ ID NO: 255; or
comprises a reverse transcriptase comprising an amino acid sequence that is at least 80% identical to SEQ ID NO: 260, and wherein the reverse transcriptase comprises an N204C and/or V106R transition mutation relative to SEQ ID NO: 260.

57. The RT editor, the tagRNA, the RT editing system, or the RT editing complex of any one of claims 3-56, wherein the RT editor further comprises an accessory domain, optionally the accessory domain comprises a single-strand binding (SSB) protein domain or a stabilon, further optionally the SSB protein domain is derived from RecA protein, Sso7d protein, or Sto7d protein.

58. The RT editor, the tagRNA, the RT editing system, or the RT editing complex of claim 57, wherein the accessory domain is situated at the N-terminus, the C-terminus, or at an internal location of the RT editor.

59. The RT editor, the tagRNA, the RT editing system, or the RT editing complex of any one of claims 57-58, wherein the RT editor comprising an accessory domain comprises an amino acid sequence that is at least 85% identical to any one of SEQ ID NOs: 1276-1298.

60. The RT editor, the tagRNA, the RT editing system, or the RT editing complex of any one of claims 57-58, wherein the SSB protein domain is derived from Sso7d and comprises one or more mutations at an amino acid position functionally equivalent to K12 and/or E35 of a wild type Sso7d amino acid sequence, optionally the one or more mutations comprise K12L and/or E35L relative to a wild type Sso7d sequence, further optionally, the SSB protein domain comprises an amino acid sequence that is at least 85% identical to SEQ ID NO: 1205.

61. The RT editor, the tagRNA, the RT editing system, or the RT editing complex of any one of claims 57-60, wherein the RT editor comprising the SSB protein domain comprises from N-terminus to C-terminus: [N-terminus of nCas9]-[linker]-[SSB protein domain]-[linker]-[RT]-[linker]-[C-terminus of nCas9], optionally the N-terminus of nCas9 comprises an amino acid sequence functionally equivalent to amino acids 1-1247 of SEQ ID NO: 6 and/or the C-terminus of nCas9 comprises an amino acid sequence functionally equivalent to amino acids 1248-1367 of SEQ ID NO: 6.

62. The RT editor, the tagRNA, the RT editing system, or the RT editing complex of claim 61, wherein the RT editor comprising the SSB protein domain comprises an amino acid sequence that is at least 85% identical to any one of SEQ ID NOs: 1207-1209.

63. A ribonucleoprotein (RNP) complex comprising the RT editing complex of any one of claims 32-62, or a component thereof.

64. A lipid nanoparticle (LNP) comprising the RT editing system of any one of claims 26-31 and 35-62, or a component thereof.

65. The LNP of claim 64, comprising the tagRNA and the nucleic acid encoding the RT editor.

66. The LNP of claim 65, wherein the nucleic acid encoding the RT editor is mRNA.

67. The LNP of any one of claims 64-66, further comprising the egRNA.

68. A polynucleotide encoding the RT editor of claim 1, the tagRNA of any one of claims 4-25 and 35-62, the RT editing system of any one of claims 26-31 and 35-56, or the RT editing complex of any one of claims 32-62.

69. The polynucleotide of claim 68, wherein the polynucleotide is an mRNA.

70. The polynucleotide of any one of claims 68-69, wherein the polynucleotide is operably linked to a regulatory element, optionally the regulatory element is an inducible regulatory element.

71. A vector comprising the polynucleotide of any one of claims 68-70.

72. The vector of claim 71, wherein the vector is an AAV vector.

73. An isolated cell comprising the RT editor of claim 1, the tagRNA of any one of claims 4-25 and 35-62, the RT editing system of any one of claims 26-31 and 35-62, the RT editing complex of any one of claims 32-62, the RNP of claim 63, the LNP of any one of claims 64-67, the polynucleotide of any one of claims 68-70, or the vector of any one of claims 71-72.

74. The cell of claim 73, wherein the cell is a mammalian cell, optionally a human cell.

75. The cell of any one of claims 73-74, wherein the cell is a primary cell.

76. The cell of any one of claims 73-75, wherein the cell is a hepatocyte.

77. The cell of any one of claims 73-76, wherein the cell is from a subject having a disease or disorder, optionally the disease or disorder is selected from the group comprising an autoimmune disease, a neurological disease or disorder, a cancer, an inflammatory disease, a cardiovascular disease, an infectious disease, a genetic disease, a trinucleotide repeat expansion disorder, a metabolic disease, or any combination thereof, optionally Wilson's disease, alpha1 antitrypsin deficiency disease, phenylketonuria, or hyperphenylalaninemia, further optionally the subject is a human.

78. A pharmaceutical composition comprising:
(i) the RT editor of claim 1, the tagRNA of any one of claims 4-25 and 35-62, the RT editing system of any one of claims 26-31 and 35-62, the RT editing complex of any one of claims 32-62, the RNP of claim 63, the LNP of any one of claims 64-67, the polynucleotide of any one of claims 68-70, the vector of any one of claims 71-72, or the cell of any one of claims 73-77; and
(ii) a pharmaceutically acceptable carrier.

79. A method for editing a double stranded target DNA, the method comprising contacting the double stranded target DNA with (i) the tagRNA of any one of claims 4-25 and 35-62 and a reverse transcriptase (RT) editor comprising a DNA binding domain, a DNA endonuclease domain and a DNA polymerase domain or (ii) the RT editing system of any one of claims 26-31 and 35-62, wherein the tagRNA directs the RT editor to incorporate the intended nucleotide edit in the double stranded target DNA, thereby editing the double stranded target DNA.

80. A method for editing a double stranded target DNA, comprising contacting the double stranded target DNA with the RT editing complex of any one of claims 32-62, wherein the tagRNA directs the RT editor to incorporate the intended nucleotide edit in the double stranded target DNA, thereby editing the double stranded target DNA.

81. The method of any one of claims 79-80, wherein the RT editor synthesizes a single stranded DNA encoded by the editing template, wherein the single stranded DNA replaces the editing target sequence and results in incorporation of the intended nucleotide edit into a region corresponding to the editing target in the double stranded target DNA.

82. The method of any one of claims 79-81, wherein the double stranded target DNA is in a cell.

83. The method of claim 82, wherein the cell is a mammalian cell, optionally a human cell.

84. The method of any one of claims 82-83, wherein the cell is a primary cell.

85. The method of any one of claims 82-84, wherein the cell is a hepatocyte.

86. The method of any one of claims 82-83, wherein the cell is a stem cell; optionally, an embryonic stem cell, an induced pluripotent stem cell, or an adult stem cell.

87. The method of any one of claims 82-86, wherein the cell is in a subject, optionally the subject is a human.

88. The method of any one of claims 82-86, wherein the cell is from a subject having a disease or disorder, optionally the disease or disorder is selected from the group comprising an autoimmune disease, a neurological disease or disorder, a cancer, an inflammatory disease, a cardiovascular disease, an infectious disease, a genetic disease, a trinucleotide repeat expansion disorder, a metabolic disease, or any combination thereof, optionally Wilson's disease, alpha1 antitrypsin deficiency disease, phenylketonuria, or hyperphenylalaninemia.

89. The method of claim 88, further comprising administering the cell to the subject after incorporation of the intended nucleotide edit.

90. A cell generated by the method of any one of claims 79-89.

91. A population of cells generated by the method of any one of claims 79-89.

92. A method for treating or preventing a disease or disorder in a subject in need thereof, the method comprising administering to the subject the RT editing system of any one of claims 26, 28-31 and 35-62, wherein the editing template comprises an intended nucleotide edit compared to a double stranded target DNA of the subject, wherein the tagRNA directs the RT editor to incorporate the intended nucleotide edit in the double stranded target DNA, and wherein incorporation of the intended nucleotide edit corrects a mutation in the double stranded target DNA associated with the disease or disorder, thereby treating or preventing the disease or disorder in the subject, optionally the disease or disorder is selected from the group comprising an autoimmune disease, a neurological disease or disorder, a cancer, an inflammatory disease, a cardiovascular disease, an infectious disease, a genetic disease, a trinucleotide repeat expansion disorder, a metabolic disease, or any combination thereof.

93. A method for treating or preventing a disease or disorder in a subject in need thereof, the method comprising administering to the subject the RT editing complex of any one of claims 33-62, the RNP of claim 63, the LNP of any one of claims 64-67, or the pharmaceutical composition of claim 78, wherein the editing template comprises an intended nucleotide edit compared to a double stranded target DNA of the subject, wherein the tagRNA directs the RT editor to incorporate the intended nucleotide edit in the double stranded target DNA, and wherein incorporation of the intended nucleotide edit corrects a mutation in the double stranded target DNA associated with the disease or disorder, thereby treating or preventing the disease or disorder in the subject, optionally the disease or disorder is selected from the group comprising an autoimmune disease, a neurological disease or disorder, a cancer, an inflammatory disease, a cardiovascular disease, an infectious disease, a genetic disease, a trinucleotide repeat expansion disorder, a metabolic disease, or any combination thereof.

94. A messenger RNA (mRNA) encoding a reverse transcriptase (RT) editor, optionally the RT editor of any one of claims 3-62.

95. The mRNA of claim 94, wherein the mRNA comprises one or more of a 5′-cap structure, a 5′-UTR, a 3′-UTR, and a nuclear localization sequence (NLS).

96. The mRNA of any one of claims 94-95, wherein the mRNA comprises (i) a 5′-cap, (ii) a 5′-untranslated region (UTR); (iii) an open reading frame (ORF) comprising a nucleotide sequence that encodes the RT editor; and (iv) a 3′ untranslated region (UTR).

97. The mRNA of any one of claims 94-96, wherein mRNA has a structure comprising or consisting of 5′-[5′UTR]-[NLS]-[nCas9]-[linker]-[RT]-[NLS]-[3′UTR and/or viral element]-[polyA sequence]-3′.

98. The mRNA of any one of claims 94-97, wherein one or more nucleosides of the mRNA sequence are chemically modified.

99. The mRNA of any one of claims 94-98, wherein the mRNA comprises one or more additional segmented polyA sequences configured to increase mRNA stability and/or half-life.

100. The mRNA of any one of claims 94-99, wherein the mRNA comprises one or more viral element sequences, optionally 3′ of the 3′-UTR.

101. The mRNA of claim 100, wherein the viral element comprises a woodchuck hepatitis virus post-transcriptional regulatory element (WPRE) sequence, optionally comprising the sequence of SEQ ID NO: 189, or a sequence that exhibits at least about 85% identity to SEQ ID NO: 189.

102. The mRNA of any one of claims 100-101, wherein the viral element comprises a eK5 sequence, optionally located 3′ of the 3′-UTR, optionally comprising the sequence of SEQ ID NO: 190, or a sequence that exhibits at least about 85% identity to SEQ ID NO: 190.

103. The mRNA of any one of claims 94-102, wherein the mRNA comprises one or more secondary structure motifs.

104. The mRNA of claim 103, wherein a secondary structure motif comprises a triple helix sequence, optionally a synthetic triple helix (STH) sequence.

105. The mRNA of claim 104, wherein the STH sequence comprises the sequence derived from a sequence element of a long non-coding RNA, optionally MALAT1.

106. The mRNA of any one of claims 104-105, wherein the STH sequence comprises any one of the sequences of SEQ ID NOs: 191-192 and 245-249, or a sequence that exhibits at least about 85% identity to any one of the sequences of SEQ ID NOs: 191-192 and 245-249.

107. The mRNA of any one of claims 94-106, wherein the mRNA comprises:
a polyA sequence comprising any one of the sequences of SEQ ID NOs: 182-187, or a sequence that exhibits at least about 85% identity to any one of the sequences of SEQ ID NOs: 182-187;
one or more 3′ UTR element sequences selected from the group comprising any one of the sequences of SEQ ID NOs: 188-190, or a sequence that exhibits at least about 85% identity to any one of the sequences of SEQ ID NOs: 188-190;
one or more 3′ UTR structural motifs selected from the group comprising any one of the sequences of SEQ ID NOs: 191-192, or a sequence that exhibits at least about 85% identity to any one of the sequences of SEQ ID NOs: 191-192;
a 5′UTR sequence comprising the sequence of any one of SEQ ID NOs: 193 and 910-933, or a sequence that exhibits at least about 85% identity to any one of SEQ ID NOs: 193 and 910-933; and/or
an RT editor sequence comprising the sequence of SEQ ID NO: 194, or a sequence that exhibits at least about 85% identity to SEQ ID NO: 194.

108. The mRNA of any one of claims 94-107, wherein the mRNA comprises a 3′ UTR comprising any one of the sequences of SEQ ID NOs: 195-219, or a sequence that exhibits at least about 85% identity to any one of the sequences of SEQ ID NOs: 195-219.

109. The mRNA of any one of claims 94-108, wherein the mRNA comprises:
one or more 5′ UTR element sequences selected from the group comprising any one of the sequences of SEQ ID NOs: 940-950 and 1075, or a sequence that exhibits at least about 85% identity to any one of the sequences of SEQ ID NOs: 940-950 and 1075;
one or more 3′ UTR element sequences selected from the group comprising any one of the sequences of SEQ ID NOs: 951-961 and 1076-1080, or a sequence that exhibits at least about 85% identity to any one of the sequences of SEQ ID NOs: 951-961 and 1076-1080; and/or
one or more additional elements selected from the group comprising any one of the sequences of SEQ ID NOs: 962-963, or a sequence that exhibits at least about 85% identity to any one of the sequences of SEQ ID NOs: 962-963, optionally the one or more additional elements are situated downstream of the 3′UTR and/or the polyA tail.

110. The mRNA of any one of claims 94-109, wherein the mRNA comprises one or more 5′-UTR element sequences selected from the group comprising any one of the sequences of SEQ ID NOs: 1081-1082, and wherein the second codon of the mRNA is a “gcc”.

111. The mRNA of any one of claims 94-110, wherein the mRNA is codon optimized for expression in human cells, optionally, the mRNA comprises the sequence of any one of SEQ ID NOs: 1086-1088.

112. A ribonucleoprotein (RNP) complex, a lipid nanoparticle (LNP), a vector, an isolated cell, or a pharmaceutical composition comprising the mRNA of any one of claims 94-111.

113. A polynucleotide encoding the mRNA of any one of claims 94-111.

The application's sequence listing, which the Patent Office published only in electronic form, follows.

SEQUENCE LISTING (1328 sequences)

SEQ ID NO: 1 - DNA, 62 bp, synthetic construct
  source 1..62: mol_type = other DNA
gggactgcggaggccagcagtgaacaacccttgggcgtggcagtcaccaaatactgtaaaga

SEQ ID NO: 2 - DNA, 61 bp, synthetic construct
  source 1..61: mol_type = other DNA
ctttacagtatttggtgactgccacgcccaagggttgttcactgctggcctccgcagtccc

SEQ ID NO: 3 - protein, 20 aa, synthetic construct
GTAEASSEQPLGVAVTKYCK

SEQ ID NO: 4 - protein, 2131 aa, synthetic construct
MKRTADGSEFESPKKKRKVDKKYSIGLDIGTNSVGWAVITDEYKVPSKKFKVLGNTDRHSIKKNLIGALLFDSGETAEATRLKRTARRRYTRRKNRICYLQEIFSNEMAKVDDSFFHRLEESFLVEEDKKHERHPIFGNIVDEVAYHEKYPTIYHLRKKLVDSTDKADLRLIYLALAHMIKFRGHFLIEGDLNPDNSDVDKLFIQLVQTYNQLFEENPINASGVDAKAILSARLSKSRKLENLIAQLPGEKKNGLFGNLIALSLGLTPNFKSNFDLAEDAKLQLSKDTYDDDLDNLLAQIGDQYADLFLAAKNLSDAILLSDILRVNTEITKAPLSASMIKRYDEHHQDLTLLKALVRQQLPEKYKEIFFDQSKNGYAGYIDGGASQEEFYKFIKPILEKMDGTEELLVKLKREDLLRKQRTFDNGSIPHQIHLGELHAILRRQEDFYPFLKDNREKIEKILTFRIPYYVGPLARGNSRFAWMTRKSEETITPWNFEEVVDKGASAQSFIERMTNFDKNLPNEKVLPKHSLLYEYFTVYNELTKVKYVTEGMRKPAFLSGEQKKAIVDLLFKTNRKVTVKQLKEDYFKKIECFDSVEISGVEDRFNASLGTYHDLLKIIKDKDFLDNEENEDILEDIVLTLTLFEDREMIEERLKTYAHLFDDKVMKQLKRRRYTGWGRLSRKLINGIRDKQSGKTILDFLKSDGFANRNFMQLIHDDSLTFKEDIQKAQVSGQGDSLHEHIANLAGSPAIKKGILQTVKVVDELVKVMGRHKPENIVIEMARENQTTQKGQKNSRERMKRIEEGIKELGSQILKEHPVENTQLQNEKLYLYYLQNGRDMYVDQELDINRLSDYDVDAIVPQSFLKDDSIDNKVLTRSDKNRGKSDNVPSEEVVKKMKNYWRQLLNAKLITQRKFDNLTKAERGGLSELDKAGFIKRQLVETRQITKHVAQILDSRMNTKYDENDKLIREVKVITLKSKLVSDFRKDFQFYKVREINNYHHAHDAYLNAVVGTALIKKYPKLESEFVYGDYKVYDVRKMIAKSEQEIGKATAKYFFYSNIMNFFKTEITLANGEIRKRPLIETNGETGEIVWDKGRDFATVRKVLSMPQVNIVKKTEVQTGGFSKESILPKRNSDKLIARKKDWDPKKYGGFDSPTVAYSVLVVAKVEKGKSKKLKSVKELLGITIMERSSFEKNPIDFLEAKGYKEVKKDLIIKLPKYSLFELENGRKRMLASAGELQKGNELALPSKYVNFLYLASHYEKLKGSPEDNEQKQLFVEQHKHYLDEIIEQISEFSKRVILADANLDKVLSAYNKHRDKPIREQAENIIHLFTLTNLGAPAAFKYFDTTIDRKRYTSTKEVLDATLIHQSITGLYETRIDLSQLGGDSGGSSGGSKRTADGSEFESPKKKRKVSGGSSGGSTLNIEDEYRLHETSKEPDVSLGSTWLSDFPQAWAETGGMGLAVRQAPLIIPLKATSTPVSIKQYPMSQEARLGIKPHIQRLLDQGILVPCQSPWNTPLLPVKKPGTNDYRPVQDLREVNKRVEDIHPTVPNPYNLLSGLPPSHQWYTVLDLKDAFFCLRLHPTSQPLFAFEWRDPEMGISGQLTWTRLPQGFKNSPTLFNEALHRDLADFRIQHPDLILLQYVDDLLLAATSELDCQQGTRALLQTLGNLGYRASAKKAQICQKQVKYLGYLLKEGQRWLTEARKETVMGQPTPKTPRQLREFLGKAGFCRLFIPGFAEMAAPLYPLTKPGTLFNWGPDQQKAYQEIKQALLTAPALGLPDLTKPFELFVDEKQGYAKGVLTQKLGPWRRPVAYLSKKLDPVAAGWPPCLRMVAAIAVLTKDAGKLTMGQPLVILAPHAVEALVKQPPDRWLSNARMTHYQALLLDTDRVQFGPVVALNPATLLPLPEEGLQHNCLDILAEAHGTRPDLTDQPLPDADHTWYTDGSSLLQEGQRKAGAAVTTETEVIWAKALPAGTSAQRAELIALTQALKMAEGKKLNVYTDSRYAFATAHIHGEIYRRRGWLTSEGKEIKNKDEILALLKALFLPKRLSIIHCPGHQKGHSAEARGNRMADQAARKAAITETPDTSTLLIENSSPSGGSKRTADGSEFESPKKKRKVGSGPAAKRVKLD

SEQ ID NO: 5 - protein, 19 aa, synthetic construct
MKRTADGSEFESPKKKRKV

SEQ ID NO: 6 - protein, 1367 aa, synthetic construct
DKKYSIGLDIGTNSVGWAVITDEYKVPSKKFKVLGNTDRHSIKKNLIGALLFDSGETAEATRLKRTARRRYTRRKNRICYLQEIFSNEMAKVDDSFFHRLEESFLVEEDKKHERHPIFGNIVDEVAYHEKYPTIYHLRKKLVDSTDKADLRLIYLALAHMIKFRGHFLIEGDLNPDNSDVDKLFIQLVQTYNQLFEENPINASGVDAKAILSARLSKSRKLENLIAQLPGEKKNGLFGNLIALSLGLTPNFKSNFDLAEDAKLQLSKDTYDDDLDNLLAQIGDQYADLFLAAKNLSDAILLSDILRVNTEITKAPLSASMIKRYDEHHQDLTLLKALVRQQLPEKYKEIFFDQSKNGYAGYIDGGASQEEFYKFIKPILEKMDGTEELLVKLKREDLLRKQRTFDNGSIPHQIHLGELHAILRRQEDFYPFLKDNREKIEKILTFRIPYYVGPLARGNSRFAWMTRKSEETITPWNFEEVVDKGASAQSFIERMTNFDKNLPNEKVLPKHSLLYEYFTVYNELTKVKYVTEGMRKPAFLSGEQKKAIVDLLFKTNRKVTVKQLKEDYFKKIECFDSVEISGVEDRFNASLGTYHDLLKIIKDKDFLDNEENEDILEDIVLTLTLFEDREMIEERLKTYAHLFDDKVMKQLKRRRYTGWGRLSRKLINGIRDKQSGKTILDFLKSDGFANRNFMQLIHDDSLTFKEDIQKAQVSGQGDSLHEHIANLAGSPAIKKGILQTVKVVDELVKVMGRHKPENIVIEMARENQTTQKGQKNSRERMKRIEEGIKELGSQILKEHPVENTQLQNEKLYLYYLQNGRDMYVDQELDINRLSDYDVDAIVPQSFLKDDSIDNKVLTRSDKNRGKSDNVPSEEVVKKMKNYWRQLLNAKLITQRKFDNLTKAERGGLSELDKAGFIKRQLVETRQITKHVAQILDSRMNTKYDENDKLIREVKVITLKSKLVSDFRKDFQFYKVREINNYHHAHDAYLNAVVGTALIKKYPKLESEFVYGDYKVYDVRKMIAKSEQEIGKATAKYFFYSNIMNFFKTEITLANGEIRKRPLIETNGETGEIVWDKGRDFATVRKVLSMPQVNIVKKTEVQTGGFSKESILPKRNSDKLIARKKDWDPKKYGGFDSPTVAYSVLVVAKVEKGKSKKLKSVKELLGITIMERSSFEKNPIDFLEAKGYKEVKKDLIIKLPKYSLFELENGRKRMLASAGELQKGNELALPSKYVNFLYLASHYEKLKGSPEDNEQKQLFVEQHKHYLDEIIEQISEFSKRVILADANLDKVLSAYNKHRDKPIREQAENIIHLFTLTNLGAPAAFKYFDTTIDRKRYTSTKEVLDATLIHQSITGLYETRIDLSQLGGD

SEQ ID NO: 7 - protein, 34 aa, synthetic construct
SGGSSGGSKRTADGSEFESPKKKRKVSGGSSGGS

SEQ ID NO: 8 - protein, 677 aa, synthetic construct
TLNIEDEYRLHETSKEPDVSLGSTWLSDFPQAWAETGGMGLAVRQAPLIIPLKATSTPVSIKQYPMSQEARLGIKPHIQRLLDQGILVPCQSPWNTPLLPVKKPGTNDYRPVQDLREVNKRVEDIHPTVPNPYNLLSGLPPSHQWYTVLDLKDAFFCLRLHPTSQPLFAFEWRDPEMGISGQLTWTRLPQGFKNSPTLFNEALHRDLADFRIQHPDLILLQYVDDLLLAATSELDCQQGTRALLQTLGNLGYRASAKKAQICQKQVKYLGYLLKEGQRWLTEARKETVMGQPTPKTPRQLREFLGKAGFCRLFIPGFAEMAAPLYPLTKPGTLFNWGPDQQKAYQEIKQALLTAPALGLPDLTKPFELFVDEKQGYAKGVLTQKLGPWRRPVAYLSKKLDPVAAGWPPCLRMVAAIAVLTKDAGKLTMGQPLVILAPHAVEALVKQPPDRWLSNARMTHYQALLLDTDRVQFGPVVALNPATLLPLPEEGLQHNCLDILAEAHGTRPDLTDQPLPDADHTWYTDGSSLLQEGQRKAGAAVTTETEVIWAKALPAGTSAQRAELIALTQALKMAEGKKLNVYTDSRYAFATAHIHGEIYRRRGWLTSEGKEIKNKDEILALLKALFLPKRLSIIHCPGHQKGHSAEARGNRMADQAARKAAITETPDTSTLLIENSSP

SEQ ID NO: 9 - protein, 120 aa, synthetic construct
SGGSSGGSSGGSSGGSSGGSSGGSSGGSSGGSSGGSSGGSSGGSSGGSSGGSSGGSSGGSSGGSSGGSSGGSSGGSSGGSSGGSSGGSSGGSSGGSSGGSSGGSSGGSSGGSSGGSSGGS

SEQ ID NO: 10 - protein, 4 aa, synthetic construct
SGGS

SEQ ID NO: 11 - protein, 18 aa, synthetic construct
KRTADGSEFESPKKKRKV

SEQ ID NO: 12 - protein, 9 aa, synthetic construct
PAAKRVKLD

SEQ ID NO: 13 - DNA, 6393 bp, synthetic construct
  source 1..6393: mol_type = other DNA
atgaaacggacagccgacggaagcgagttcgagtcaccaaagaagaagcggaaagtcgacaagaagtacagcatcggcctggacatcggcaccaactctgtgggctgggccgtgatcaccgacgagtacaaggtgcccagcaagaaattcaaggtgctgggcaacaccgaccggcacagcatcaagaagaacctgatcggagccctgctgttcgacagcggcgaaacagccgaggccacccggctgaagagaaccgccagaagaagatacaccagacggaagaaccggatctgctatctgcaagagatcttcagcaacgagatggccaaggtggacgacagcttcttccacagactggaagagtccttcctggtggaagaggataagaagcacgagcggcaccccatcttcggcaacatcgtggacgaggtggcctaccacgagaagtaccccaccatctaccacctgagaaagaaactggtggacagcaccgacaaggccgacctgcggctgatctatctggccctggcccacatgatcaagttccggggccacttcctgatcgagggcgacctgaaccccgacaacagcgacgtggacaagctgttcatccagctggtgcagacctacaaccagctgttcgaggaaaaccccatcaacgccagcggcgtggacgccaaggccatcctgtctgccagactgagcaagagcagaaagctggaaaatctgatcgcccagctgcccggcgagaagaagaatggcctgttcggaaacctgattgccctgagcctgggcctgacccccaacttcaagagcaacttcgacctggccgaggatgccaaactgcagctgagcaaggacacctacgacgacgacctggacaacctgctggcccagatcggcgaccagtacgccgacctgtttctggccgccaagaacctgtccgacgccatcctgctgagcgacatcctgagagtgaacaccgagatcaccaaggcccccctgagcgcctctatgatcaagagatacgacgagcaccaccaggacctgaccctgctgaaagctctcgtgcggcagcagctgcctgagaagtacaaagagattttcttcgaccagagcaagaacggctacgccggctacattgacggcggagccagccaggaagagttctacaagttcatcaagcccatcctggaaaagatggacggcaccgaggaactgctcgtgaagctgaagagagaggacctgctgcggaagcagcggaccttcgacaacggcagcatcccccaccagatccacctgggagagctgcacgccattctgcggcggcaggaagatttttacccattcctgaaggacaaccgggaaaagatcgagaagatcctgaccttccgcatcccctactacgtgggccctctggccaggggaaacagcagattcgcctggatgaccagaaagagcgaggaaaccatcaccccctggaacttcgaggaagtggtggacaagggcgcttccgcccagagcttcatcgagcggatgaccaacttcgataagaacctgcccaacgagaaggtgctgcccaagcacagcctgctgtacgagtacttcaccgtgtataacgagctgaccaaagtgaaatacgtgaccgagggaatgagaaagcccgccttcctgagcggcgagcagaaaaaggccatcgtggacctgctgttcaagaccaaccggaaagtgaccgtgaagcagctgaaagaggactacttcaagaaaatcgagtgcttcgactccgtggaaatctccggcgtggaagatcggttcaacgcctccctgggcacataccacgatctgctgaaaattatcaaggacaaggacttcctggacaatgaggaaaacgaggacattctggaagatatcgtgctgaccctgacactgtttgaggacagagagatgatcgaggaacggctgaaaacctatgcccacctgttcgacgacaaagtgatgaagcagctgaagcggcggagatacaccggctggggcaggctgagccggaagctgatcaacggcatccgggacaagcagtccggcaagacaatcctggatttcctgaagtccgacggcttcgccaacagaaacttcatgcagctgatccacgacgacagcctgacctttaaagaggacatccagaaagcccaggtgtccggccagggcgatagcctgcacgagcacattgccaatctggccggcagccccgccattaagaagggcatcctgcagacagtgaaggtggtggacgagctcgtgaaagtgatgggccggcacaagcccgagaacatcgtgatcgaaatggccagagagaaccagaccacccagaagggacagaagaacagccgcgagagaatgaagcggatcgaagagggcatcaaagagctgggcagccagatcctgaaagaacaccccgtggaaaacacccagctgcagaacgagaagctgtacctgtactacctgcagaatgggcgggatatgtacgtggaccaggaactggacatcaaccggctgtccgactacgatgtggacgctatcgtgcctcagagctttctgaaggacgactccatcgacaacaaggtgctgaccagaagcgacaagaaccggggcaagagcgacaacgtgccctccgaagaggtcgtgaagaagatgaagaactactggcggcagctgctgaacgccaagctgattacccagagaaagttcgacaatctgaccaaggccgagagaggcggcctgagcgaactggataaggccggcttcatcaagagacagctggtggaaacccggcagatcacaaagcacgtggcacagatcctggactcccggatgaacactaagtacgacgagaatgacaagctgatccgggaagtgaaagtgatcaccctgaagtccaagctggtgtccgatttccggaaggatttccagttttacaaagtgcgcgagatcaacaactaccaccacgcccacgacgcctacctgaacgccgtcgtgggaaccgccctgatcaaaaagtaccctaagctggaaagcgagttcgtgtacggcgactacaaggtgtacgacgtgcggaagatgatcgccaagagcgagcaggaaatcggcaaggctaccgccaagtacttcttctacagcaacatcatgaactttttcaagaccgagattaccctggccaacggcgagatccggaagcggcctctgatcgagacaaacggcgaaaccggggagatcgtgtgggataagggccgggattttgccaccgtgcggaaagtgctgagcatgccccaagtgaatatcgtgaaaaagaccgaggtgcagacaggcggcttcagcaaagagtctatcctgcccaagaggaacagcgataagctgatcgccagaaagaaggactgggaccctaagaagtacggcggcttcgacagccccaccgtggcctattctgtgctggtggtggccaaagtggaaaagggcaagtccaagaaactgaagagtgtgaaagagctgctggggatcaccatcatggaaagaagcagcttcgagaagaatcccatcgactttctggaagccaagggctacaaagaagtgaaaaaggacctgatcatcaagctgcctaagtactccctgttcgagctggaaaacggccggaagagaatgctggcctctgccggcgaactgcagaagggaaacgaactggccctgccctccaaatatgtgaacttcctgtacctggccagccactatgagaagctgaagggctcccccgaggataatgagcagaaacagctgtttgtggaacagcacaagcactacctggacgagatcatcgagcagatcagcgagttctccaagagagtgatcctggccgacgctaatctggacaaagtgctgtccgcctacaacaagcaccgggataagcccatcagagagcaggccgagaatatcatccacctgtttaccctgaccaatctgggagcccctgccgccttcaagtactttgacaccaccatcgaccggaagaggtacaccagcaccaaagaggtgctggacgccaccctgatccaccagagcatcaccggcctgtacgagacacggatcgacctgtctcagctgggaggtgactccggcggaagctctggtggcagcaagcggaccgccgacggctctgaattcgagagccctaagaagaaaagaaaggtgagcggaggctctagcggcggaagcaccctgaacattgaagacgagtatagactgcatgaaacaagcaaggaacccgacgtgtccctgggctccacctggctgtccgactttccccaggcctgggccgagacaggaggaatgggcctggccgtgcggcaggcacccctgatcatccctctgaaggccacctctacacccgtgagcatcaagcagtaccctatgtctcaggaggccagactgggcatcaagcctcacatccagaggctgctggaccagggcatcctggtgccatgccagagcccctggaacacaccactgctgcccgtgaagaagccaggcaccaatgactatagacccgtgcaggatctgagagaggtgaacaagagggtggaggatatccaccccaccgtgcccaacccttacaatctgctgtccggcctgcccccttctcaccagtggtatacagtgctggacctgaaggatgccttcttttgtctgagactgcaccctaccagccagccactgttcgcctttgagtggagggaccctgagatgggcatctctggccagctgacctggacacgcctgcctcagggcttcaagaatagcccaacactgtttaacgaggccctgcaccgcgacctggcagatttccggatccagcacccagatctgatcctgctgcagtacgtggacgatctgctgctggccgccaccagcgagctggattgccagcagggaacacgcgccctgctgcagaccctgggaaacctgggatatagggcatccgccaagaaggcccagatctgtcagaagcaggtgaagtacctgggctatctgctgaaggagggccagagatggctgacagaggccaggaaggagacagtgatgggccagccaacacccaagaccccaagacagctgagggagttcctgggcaaagcaggattttgcaggctgttcatcccaggattcgcagagatggcagcacctctgtacccactgaccaagccgggcaccctgtttaattggggccctgaccagcagaaggcctatcaggagatcaagcaggccctgctgacagcaccagccctgggcctgccagacctgaccaagcctttcgagctgtttgtggatgagaagcagggctacgccaagggcgtgctgacccagaagctgggaccatggagacggcccgtggcctatctgtccaagaagctggacccagtggcagcaggatggccaccatgcctgaggatggtggcagcaatcgccgtgctgacaaaggatgccggcaagctgaccatgggacagccactggtcatcctggcaccacacgcagtggaggccctggtgaagcagcctccagatcgctggctgtctaacgcccggatgacacactaccaggccctgctgctggacaccgatcgcgtgcagtttggccctgtggtggccctgaatccagccaccctgctgcctctgccagaggagggcctgcagcacaactgtctggacatcctggcagaggcacacggaacaaggccagacctgaccgatcagcccctgcctgacgccgatcacacatggtataccgatggaagctccctgctgcaggagggccagaggaaggcaggagcagcagtgaccacagagacagaagtgatctgggccaaggccctgccagcaggcacatccgcccagcgggccgagctgatcgccctgacccaggccctgaagatggccgagggcaagaagctgaacgtgtacacagactccagatatgccttcgccaccgcacacatccacggagagatctacaggcgccggggctggctgacctctgagggcaaggagatcaagaacaaggatgagatcctggccctgctgaaggccctgtttctgcccaagcggctgagcatcatccactgtcctggacaccagaagggacactccgccgaggcaaggggcaatcggatggccgaccaggccgccagaaaggctgctattactgaaactcccgacacttccactctgctgattgaaaactcctccccttctggcggctcaaaaagaaccgccgacggcagcgaattcgagtctcccaagaagaagaggaaagtcggctctggccctgccgctaagagagtgaagctggac

SEQ ID NO: 14 - protein, 1368 aa, synthetic construct [sequence omitted]

SEQ ID NO: 15 - protein, 677 aa, synthetic construct
TLNIEDEYRLHETSKEPDVSLGSTWLSDFPQAWAETGGMGLAVRQAPLIIPLKATSTPVSIKQYPMSQEARLGIKPHIQRLLDQGILVPCQSPWNTPLLPVKKPGTNDYRPVQDLREVNKRVEDIHPTVPNPYNLLSGLPPSHQWYTVLDLKDAFFCLRLHPTSQPLFAFEWRDPEMGISGQLTWTRLPQGFKNSPTLFDEALHRDLADFRIQHPDLILLQYVDDLLLAATSELDCQQGTRALLQTLGNLGYRASAKKAQICQKQVKYLGYLLKEGQRWLTEARKETVMGQPTPKTPRQLREFLGTAGFCRLWIPGFAEMAAPLYPLTKTGTLFNWGPDQQKAYQEIKQALLTAPALGLPDLTKPFELFVDEKQGYAKGVLTQKLGPWRRPVAYLSKKLDPVAAGWPPCLRMVAAIAVLTKDAGKLTMGQPLVILAPHAVEALVKQPPDRWLSNARMTHYQALLLDTDRVQFGPVVALNPATLLPLPEEGLQHNCLDILAEAHGTRPDLTDQPLPDADHTWYTDGSSLLQEGQRKAGAAVTTETEVIWAKALPAGTSAQRAELIALTQALKMAEGKKLNVYTDSRYAFATAHIHGEIYRRRGLLTSEGKEIKNKDEILALLKALFLPKRLSIIHCPGHQKGHSAEARGNRMADQAARKAAITETPDTSTLLIENSSP

SEQ ID NO: 16 - RNA, 134 nt, synthetic construct
  source 1..134: mol_type = other RNA
ttggtgactgccacgcccaagttttagagctagaaatagcaagttaaaataaggctagtccgttatcaacttgaaaaagtggcaccgagtcggtgcgccagcagtgaacaccccttgggcgtggcagtcatttt

SEQ ID NO: 17 - RNA, 133 nt, synthetic construct
  source 1..133: mol_type = other RNA
ttggtgactgccacgcccaagttttagagctagaaatagcaagttaaaataaggctagtccgttatcaacttgaaaaagtggcaccgagtcggtgcgccagcagtgaacaccccttgggcgtggcagtctttt

SEQ ID NO: 18 - RNA, 132 nt, synthetic construct
  source 1..132: mol_type = other RNA
ttggtgactgccacgcccaagttttagagctagaaatagcaagttaaaataaggctagtccgttatcaacttgaaaaagtggcaccgagtcggtgcgccagcagtgaacaccccttgggcgtggcagttttt

SEQ ID NO: 19 - RNA, 131 nt, synthetic construct
  source 1..131: mol_type = other RNA
ttggtgactgccacgcccaagttttagagctagaaatagcaagttaaaataaggctagtccgttatcaacttgaaaaagtggcaccgagtcggtgcgccagcagtgaacaccccttgggcgtggcagtttt

SEQ ID NO: 20 - RNA, 130 nt, synthetic construct
  source 1..130: mol_type = other RNA
ttggtgactgccacgcccaagttttagagctagaaatagcaagttaaaataaggctagtccgttatcaacttgaaaaagtggcaccgagtcggtgcgccagcagtgaacaccccttgggcgtggcatttt

SEQ ID NO: 21 - RNA, 129 nt, synthetic construct
  source 1..129: mol_type = other RNA
ttggtgactgccacgcccaagttttagagctagaaatagcaagttaaaataaggctagtccgttatcaacttgaaaaagtggcaccgagtcggtgcgccagcagtgaacaccccttgggcgtggctttt

SEQ ID NO: 22 - RNA, 128 nt, synthetic construct
  source 1..128: mol_type = other RNA
ttggtgactgccacgcccaagttttagagctagaaatagcaagttaaaataaggctagtccgttatcaacttgaaaaagtggcaccgagtcggtgcgccagcagtgaacaccccttgggcgtggtttt

SEQ ID NO: 23 - RNA, 127 nt, synthetic construct
  source 1..127: mol_type = other RNA
ttggtgactgccacgcccaagttttagagctagaaatagcaagttaaaataaggctagtccgttatcaacttgaaaaagtggcaccgagtcggtgcgccagcagtgaacaccccttgggcgtgtttt

SEQ ID NO: 24 - RNA, 130 nt, synthetic construct
  source 1..130: mol_type = other RNA
ttggtgactgccacgcccaagttttagagctagaaatagcaagttaaaataaggctagtccgttatcaacttgaaaaagtggcaccgagtcggtgcgcagtgaacaccccttgggcgtggcagtcatttt

SEQ ID NO: 25 - RNA, 129 nt, synthetic construct
  source 1..129: mol_type = other RNA
ttggtgactgccacgcccaagttttagagctagaaatagcaagttaaaataaggctagtccgttatcaacttgaaaaagtggcaccgagtcggtgcgcagtgaacaccccttgggcgtggcagtctttt

SEQ ID NO: 26 - RNA, 128 nt, synthetic construct
  source 1..128: mol_type = other RNA
ttggtgactgccacgcccaagttttagagctagaaatagcaagttaaaataaggctagtccgttatcaacttgaaaaagtggcaccgagtcggtgcgcagtgaacaccccttgggcgtggcagttttt

SEQ ID NO: 27 - RNA, 127 nt, synthetic construct
  source 1..127: mol_type = other RNA
ttggtgactgccacgcccaagttttagagctagaaatagcaagttaaaataaggctagtccgttatcaacttgaaaaagtggcaccgagtcggtgcgcagtgaacaccccttgggcgtggcagtttt

SEQ ID NO: 28 - RNA, 126 nt, synthetic construct
  source 1..126: mol_type = other RNA
ttggtgactgccacgcccaagttttagagctagaaatagcaagttaaaataaggctagtccgttatcaacttgaaaaagtggcaccgagtcggtgcgcagtgaacaccccttgggcgtggcatttt

SEQ ID NO: 29 - RNA, 125 nt, synthetic construct
  source 1..125: mol_type = other RNA
ttggtgactgccacgcccaagttttagagctagaaatagcaagttaaaataaggctagtccgttatcaacttgaaaaagtggcaccgagtcggtgcgcagtgaacaccccttgggcgtggctttt

SEQ ID NO: 30 - RNA, 124 nt, synthetic construct
  source 1..124: mol_type = other RNA
ttggtgactgccacgcccaagttttagagctagaaatagcaagttaaaataaggctagtccgttatcaacttgaaaaagtggcaccgagtcggtgcgcagtgaacaccccttgggcgtggtttt

SEQ ID NO: 31 - RNA, 123 nt, synthetic construct
  source 1..123: mol_type = other RNA
ttggtgactgccacgcccaagttttagagctagaaatagcaagttaaaataaggctagtccgttatcaacttgaaaaagtggcaccgagtcggtgcgcagtgaacaccccttgggcgtgtttt

SEQ ID NO: 32 - RNA, 127 nt, synthetic construct
  source 1..127: mol_type = other RNA
ttggtgactgccacgcccaagttttagagctagaaatagcaagttaaaataaggctagtccgttatcaacttgaaaaagtggcaccgagtcggtgcgtgaacaccccttgggcgtggcagtcatttt

SEQ ID NO: 33 - RNA, 126 nt, synthetic construct
  source 1..126: mol_type = other RNA
ttggtgactgccacgcccaagttttagagctagaaatagcaagttaaaataaggctagtccgttatcaacttgaaaaagtggcaccgagtcggtgcgtgaacaccccttgggcgtggcagtctttt

SEQ ID NO: 34 - RNA, 125 nt, synthetic construct
  source 1..125: mol_type = other RNA
ttggtgactgccacgcccaagttttagagctagaaatagcaagttaaaataaggctagtccgttatcaacttgaaaaagtggcaccgagtcggtgcgtgaacaccccttgggcgtggcagttttt

SEQ ID NO: 35 - RNA, 124 nt, synthetic construct
  source 1..124: mol_type = other RNA
ttggtgactgccacgcccaagttttagagctagaaatagcaagttaaaataaggctagtccgttatcaacttgaaaaagtggcaccgagtcggtgcgtgaacaccccttgggcgtggcagtttt

SEQ ID NO: 36 - RNA, 123 nt, synthetic construct
  source 1..123: mol_type = other RNA
ttggtgactgccacgcccaagttttagagctagaaatagcaagttaaaataaggctagtccgttatcaacttgaaaaagtggcaccgagtcggtgcgtgaacaccccttgggcgtggcatttt

SEQ ID NO: 37 - RNA, 122 nt, synthetic construct
  source 1..122: mol_type = other RNA
ttggtgactgccacgcccaagttttagagctagaaatagcaagttaaaataaggctagtccgttatcaacttgaaaaagtggcaccgagtcggtgcgtgaacaccccttgggcgtggctttt

SEQ ID NO: 38 - RNA, 121 nt, synthetic construct
  source 1..121: mol_type = other RNA
ttggtgactgccacgcccaagttttagagctagaaatagcaagttaaaataaggctagtccgttatcaacttgaaaaagtggcaccgagtcggtgcgtgaacaccccttgggcgtggtttt

SEQ ID NO: 39 - RNA, 120 nt, synthetic construct
  source 1..120: mol_type = other RNA
ttggtgactgccacgcccaagttttagagctagaaatagcaagttaaaataaggctagtccgttatcaacttgaaaaagtggcaccgagtcggtgcgtgaacaccccttgggcgtgtttt

SEQ ID NO: 40 - RNA, 125 nt, synthetic construct
  source 1..125: mol_type = other RNA
ttggtgactgccacgcccaagttttagagctagaaatagcaagttaaaataaggctagtccgttatcaacttgaaaaagtggcaccgagtcggtgcgaacaccccttgggcgtggcagtcatttt

SEQ ID NO: 41 - RNA, 124 nt, synthetic construct
  source 1..124: mol_type = other RNA
ttggtgactgccacgcccaagttttagagctagaaatagcaagttaaaataaggctagtccgttatcaacttgaaaaagtggcaccgagtcggtgcgaacaccccttgggcgtggcagtctttt

SEQ ID NO: 42 - RNA, 123 nt, synthetic construct
  source 1..123: mol_type = other RNA
ttggtgactgccacgcccaagttttagagctagaaatagcaagttaaaataaggctagtccgttatcaacttgaaaaagtggcaccgagtcggtgcgaacaccccttgggcgtggcagttttt

SEQ ID NO: 43 - RNA, 122 nt, synthetic construct
  source 1..122: mol_type = other RNA
ttggtgactgccacgcccaagttttagagctagaaatagcaagttaaaataaggctagtccgttatcaacttgaaaaagtggcaccgagtcggtgcgaacaccccttgggcgtggcagtttt

SEQ ID NO: 44 - RNA, 121 nt, synthetic construct
  source 1..121: mol_type = other RNA
ttggtgactgccacgcccaagttttagagctagaaatagcaagttaaaataaggctagtccgttatcaacttgaaaaagtggcaccgagtcggtgcgaacaccccttgggcgtggcatttt

SEQ ID NO: 45 - RNA, 120 nt, synthetic construct
  source 1..120: mol_type = other RNA
ttggtgactgccacgcccaagttttagagctagaaatagcaagttaaaataaggctagtccgttatcaacttgaaaaagtggcaccgagtcggtgcgaacaccccttgggcgtggctttt

SEQ ID NO: 46 - RNA, 119 nt, synthetic construct
  source 1..119: mol_type = other RNA
ttggtgactgccacgcccaagttttagagctagaaatagcaagttaaaataaggctagtccgttatcaacttgaaaaagtggcaccgagtcggtgcgaacaccccttgggcgtggtttt

SEQ ID NO: 47 - RNA, 118 nt, synthetic construct
  source 1..118: mol_type = other RNA
ttggtgactgccacgcccaagttttagagctagaaatagcaagttaaaataaggctagtccgttatcaacttgaaaaagtggcaccgagtcggtgcgaacaccccttgggcgtgtttt

SEQ ID NO: 48 - RNA, 100 nt, synthetic construct
  source 1..100: mol_type = other RNA
ggccagcagtgaacacccctgttttagagctagaaatagcaagttaaaataaggctagtccgttatcaacttgaaaaagtggcaccgagtcggtgctttt

SEQ ID NO: 49 - RNA, 100 nt, synthetic construct
  source 1..100: mol_type = other RNA
gccagcagtgaacaccccttgttttagagctagaaatagcaagttaaaataaggctagtccgttatcaacttgaaaaagtggcaccgagtcggtgctttt

SEQ ID NO: 50 - RNA, 20 nt, synthetic construct
  source 1..20: mol_type = other RNA
ttggtgactgccacgcccaa

SEQ ID NO: 51 - RNA, 20 nt, synthetic construct
  source 1..20: mol_type = other RNA
ggccagcagtgaacacccct

SEQ ID NO: 52 - RNA, 20 nt, synthetic construct
  source 1..20: mol_type = other RNA
gccagcagtgaacacccctt

SEQ ID NO: 53 - DNA, 20 bp, synthetic construct
  source 1..20: mol_type = other DNA
ttggtgactgccacgcccaa

SEQ ID NO: 54 - DNA, 20 bp, synthetic construct
  source 1..20: mol_type = other DNA
ggccagcagtgaacacccct

SEQ ID NO: 55 - DNA, 20 bp, synthetic construct
  source 1..20: mol_type = other DNA
gccagcagtgaacacccctt

SEQ ID NO: 56 - DNA, 9365 bp, synthetic construct
  source 1..9365: mol_type = other DNA
gacaaaagggcctcgtgatacgcctatttttataggttaatgtcatgataataatggtttcttagacgtcaggtggcacttttcggggaaatgtgcgcggaacccctatttgtttatttttctaaatacattcaaatatgtatccgctcatgagacaataaccctgataaatgcttcaataatattgaaaaaggaagagtatgagccatattcaacgggaaacgtcttgctctaggccgcgattaaattccaacatggatgctgatttatatgggtataaatgggctcgcgataatgtcgggcaatcaggtgcgacaatctatcgattgtatgggaagcccgatgcgccagagttgtttctgaaacatggcaaaggtagcgttgccaatgatgttacagatgagatggtcagactaaactggctgacggaatttatgcctcttccgaccatcaagcattttatccgtactcctgatgatgcatggttactcaccactgcgatccctgggaaaacagcattccaggtattagaagaatatcctgattcaggtgaaaatattgttgatgcgctggcagtgttcctgcgccggttgcattcgattcctgtttgtaattgtccttttaacagcgatcgcgtatttcgtttcgctcaggcgcaatcacgaatgaataacggtttggttgatgcgagtgattttgatgacgagcgtaatggctggcctgttgaacaagtctggaaagaaatgcataaacttttgccattctcaccggattcagtcgtcactcatggtgatttctcacttgataaccttatttttgacgaggggaaattaataggttgtattgatgttggacgagtcggaatcgcagaccgataccaggatcttgccatcctatggaactgcctcggtgagttttctccttcattacagaaacggctttttcaaaaatatggtattgataatcctgatatgaataaattgcagtttcatttgatgctcgatgagtttttctaactgtcagaccaagtttactcatatatactttagattgatttaaaacttcatttttaatttaaaaggatctaggtgaagatcctttttgataatctcatgaccaaaatcccttaacgtgagttttcgttccactgagcgtcagaccccgtagaaaagatcaaaggatcttcttgagatcctttttttctgcgcgtaatctgctgcttgcaaacaaaaaaaccaccgctaccagcggtggtttgtttgccggatcaagagctaccaactctttttccgaaggtaactggcttcagcagagcgcagataccaaatactgttcttctagtgtagccgtagttaggccaccacttcaagaactctgtagcaccgcctacatacctcgctctgctaatcctgttaccagtggctgctgccagtggcgataagtcgtgtcttaccgggttggactcaagacgatagttaccggataaggcgcagcggtcgggctgaacggggggttcgtgcacacagcccagcttggagcgaacgacctacaccgaactgagatacctacagcgtgagctatgagaaagcgccacgcttcccgaagggagaaaggcggacaggtatccggtaagcggcagggtcggaacaggagagcgcacgagggagcttccagggggaaacgcctggtatctttatagtcctgtcgggtttcgccacctctgacttgagcgtcgatttttgtgatgctcgtcaggggggcggagcctatggaaaaacgccagcaacgcggcctttttacggttcctggccttttgctggccttttgctcacatgttctttcctgcgttatcccctgattctgtggataaccgtattaccgcctttgagtgagctgataccgctcgccgcagccgaacgaccgagcgcagcgagtcagtgagcgaggaagcggaacagcgcccaatacgcaaaccgcctctccccgcgcgttggccgattcattaatgcagctggcacgacaggtttcccgactggaaagcgggcagtgagcgcaacgcaattaatgtgagttagctcactcattaggcaccccaggctttacactttatgcttccggctcgtatgttgtgtggaattgtgagcggataacaatttcacacaggaaacagctatgaccatgctcgagccaagctcggcgcgccattgggatggaacaatctagaaaggggtaatacgactcactataaggaaataagagagaaaagaagagtaagaagaaatataagagccaccatgaaacggacagccgacggaagcgagttcgagtcaccaaagaagaagcggaaagtcgacaagaagtacagcatcggcctggacatcggcaccaactctgtgggctgggccgtgatcaccgacgagtacaaggtgcccagcaagaaattcaaggtgctgggcaacaccgaccggcacagcatcaagaagaacctgatcggagccctgctgttcgacagcggcgaaacagccgaggccacccggctgaagagaaccgccagaagaagatacaccagacggaagaaccggatctgctatctgcaagagatcttcagcaacgagatggccaaggtggacgacagcttcttccacagactggaagagtccttcctggtggaagaggataagaagcacgagcggcaccccatcttcggcaacatcgtggacgaggtggcctaccacgagaagtaccccaccatctaccacctgagaaagaaactggtggacagcaccgacaaggccgacctgcggctgatctatctggccctggcccacatgatcaagttccggggccacttcctgatcgagggcgacctgaaccccgacaacagcgacgtggacaagctgttcatccagctggtgcagacctacaaccagctgttcgaggaaaaccccatcaacgccagcggcgtggacgccaaggccatcctgtctgccagactgagcaagagcagaaagctggaaaatctgatcgcccagctgcccggcgagaagaagaatggcctgttcggaaacctgattgccctgagcctgggcctgacccccaacttcaagagcaacttcgacctggccgaggatgccaaactgcagctgagcaaggacacctacgacgacgacctggacaacctgctggcccagatcggcgaccagtacgccgacctgtttctggccgccaagaacctgtccgacgccatcctgctgagcgacatcctgagagtgaacaccgagatcaccaaggcccccctgagcgcctctatgatcaagagatacgacgagcaccaccaggacctgaccctgctgaaagctctcgtgcggcagcagctgcctgagaagtacaaagagattttcttcgaccagagcaagaacggctacgccggctacattgacggcggagccagccaggaagagttctacaagttcatcaagcccatcctggaaaagatggacggcaccgaggaactgctcgtgaagctgaagagagaggacctgctgcggaagcagcggaccttcgacaacggcagcatcccccaccagatccacctgggagagctgcacgccattctgcggcggcaggaagatttttacccattcctgaaggacaaccgggaaaagatcgagaagatcctgaccttccgcatcccctactacgtgggccctctggccaggggaaacagcagattcgcctggatgaccagaaagagcgaggaaaccatcaccccctggaacttcgaggaagtggtggacaagggcgcttccgcccagagcttcatcgagcggatgaccaacttcgataagaacctgcccaacgagaaggtgctgcccaagcacagcctgctgtacgagtacttcaccgtgtataacgagctgaccaaagtgaaatacgtgaccgagggaatgagaaagcccgccttcctgagcggcgagcagaaaaaggccatcgtggacctgctgttcaagaccaaccggaaagtgaccgtgaagcagctgaaagaggactacttcaagaaaatcgagtgcttcgactccgtggaaatctccggcgtggaagatcggttcaacgcctccctgggcacataccacgatctgctgaaaattatcaaggacaaggacttcctggacaatgaggaaaacgaggacattctggaagatatcgtgctgaccctgacactgtttgaggacagagagatgatcgaggaacggctgaaaacctatgcccacctgttcgacgacaaagtgatgaagcagctgaagcggcggagatacaccggctggggcaggctgagccggaagctgatcaacggcatccgggacaagcagtccggcaagacaatcctggatttcctgaagtccgacggcttcgccaacagaaacttcatgcagctgatccacgacgacagcctgacctttaaagaggacatccagaaagcccaggtgtccggccagggcgatagcctgcacgagcacattgccaatctggccggcagccccgccattaagaagggcatcctgcagacagtgaaggtggtggacgagctcgtgaaagtgatgggccggcacaagcccgagaacatcgtgatcgaaatggccagagagaaccagaccacccagaagggacagaagaacagccgcgagagaatgaagcggatcgaagagggcatcaaagagctgggcagccagatcctgaaagaacaccccgtggaaaacacccagctgcagaacgagaagctgtacctgtactacctgcagaatgggcgggatatgtacgtggaccaggaactggacatcaaccggctgtccgactacgatgtggacgctatcgtgcctcagagctttctgaaggacgactccatcgacaacaaggtgctgaccagaagcgacaagaaccggggcaagagcgacaacgtgccctccgaagaggtcgtgaagaagatgaagaactactggcggcagctgctgaacgccaagctgattacccagagaaagttcgacaatctgaccaaggccgagagaggcggcctgagcgaactggataaggccggcttcatcaagagacagctggtggaaacccggcagatcacaaagcacgtggcacagatcctggactcccggatgaacactaagtacgacgagaatgacaagctgatccgggaagtgaaagtgatcaccctgaagtccaagctggtgtccgatttccggaaggatttccagttttacaaagtgcgcgagatcaacaactaccaccacgcccacgacgcctacctgaacgccgtcgtgggaaccgccctgatcaaaaagtaccctaagctggaaagcgagttcgtgtacggcgactacaaggtgtacgacgtgcggaagatgatcgccaagagcgagcaggaaatcggcaaggctaccgccaagtacttcttctacagcaacatcatgaactttttcaagaccgagattaccctggccaacggcgagatccggaagcggcctctgatcgagacaaacggcgaaaccggggagatcgtgtgggataagggccgggattttgccaccgtgcggaaagtgctgagcatgccccaagtgaatatcgtgaaaaagaccgaggtgcagacaggcggcttcagcaaagagtctatcctgcccaagaggaacagcgataagctgatcgccagaaagaaggactgggaccctaagaagtacggcggcttcgacagccccaccgtggcctattctgtgctggtggtggccaaagtggaaaagggcaagtccaagaaactgaagagtgtgaaagagctgctggggatcaccatcatggaaagaagcagcttcgagaagaatcccatcgactttctggaagccaagggctacaaagaagtgaaaaaggacctgatcatcaagctgcctaagtactccctgttcgagctggaaaacggccggaagagaatgctggcctctgccggcgaactgcagaagggaaacgaactggccctgccctccaaatatgtgaacttcctgtacctggccagccactatgagaagctgaagggctcccccgaggataatgagcagaaacagctgtttgtggaacagcacaagcactacctggacgagatcatcgagcagatcagcgagttctccaagagagtgatcctggccgacgctaatctggacaaagtgctgtccgcctacaacaagcaccgggataagcccatcagagagcaggccgagaatatcatccacctgtttaccctgaccaatctgggagcccctgccgccttcaagtactttgacaccaccatcgaccggaagaggtacaccagcaccaaagaggtgctggacgccaccctgatccaccagagcatcaccggcctgtacgagacacggatcgacctgtctcagctgggaggtgactccggcggaagctctggtggcagcaagcggaccgccgacggctctgaattcgagagccctaagaagaaaagaaaggtgagcggaggctctagcggcggaagcaccctgaacattgaagacgagtatagactgcatgaaacaagcaaggaacccgacgtgtccctgggctccacctggctgtccgactttccccaggcctgggccgagacaggaggaatgggcctggccgtgcggcaggcacccctgatcatccctctgaaggccacctctacacccgtgagcatcaagcagtaccctatgtctcaggaggccagactgggcatcaagcctcacatccagaggctgctggaccagggcatcctggtgccatgccagagcccctggaacacaccactgctgcccgtgaagaagccaggcaccaatgactatagacccgtgcaggatctgagagaggtgaacaagagggtggaggatatccaccccaccgtgcccaacccttacaatctgctgtccggcctgcccccttctcaccagtggtatacagtgctggacctgaaggatgccttcttttgtctgagactgcaccctaccagccagccactgttcgcctttgagtggagggaccctgagatgggcatctctggccagctgacctggacacgcctgcctcagggcttcaagaatagcccaacactgtttaacgaggccctgcaccgcgacctggcagatttccggatccagcacccagatctgatcctgctgcagtacgtggacgatctgctgctggccgccaccagcgagctggattgccagcagggaacacgcgccctgctgcagaccctgggaaacctgggatatagggcatccgccaagaaggcccagatctgtcagaagcaggtgaagtacctgggctatctgctgaaggagggccagagatggctgacagaggccaggaaggagacagtgatgggccagccaacacccaagaccccaagacagctgagggagttcctgggcaaagcaggattttgcaggctgttcatcccaggattcgcagagatggcagcacctctgtacccactgaccaagccgggcaccctgtttaattggggccctgaccagcagaaggcctatcaggagatcaagcaggccctgctgacagcaccagccctgggcctgccagacctgaccaagcctttcgagctgtttgtggatgagaagcagggctacgccaagggcgtgctgacccagaagctgggaccatggagacggcccgtggcctatctgtccaagaagctggacccagtggcagcaggatggccaccatgcctgaggatggtggcagcaatcgccgtgctgacaaaggatgccggcaagctgaccatgggacagccactggtcatcctggcaccacacgcagtggaggccctggtgaagcagcctccagatcgctggctgtctaacgcccggatgacacactaccaggccctgctgctggacaccgatcgcgtgcagtttggccctgtggtggccctgaatccagccaccctgctgcctctgccagaggagggcctgcagcacaactgtctggacatcctggcagaggcacacggaacaaggccagacctgaccgatcagcccctgcctgacgccgatcacacatggtataccgatggaagctccctgctgcaggagggccagaggaaggcaggagcagcagtgaccacagagacagaagtgatctgggccaaggccctgccagcaggcacatccgcccagcgggccgagctgatcgccctgacccaggccctgaagatggccgagggcaagaagctgaacgtgtacacagactccagatatgccttcgccaccgcacacatccacggagagatctacaggcgccggggctggctgacctctgagggcaaggagatcaagaacaaggatgagatcctggccctgctgaaggccctgtttctgcccaagcggctgagcatcatccactgtcctggacaccagaagggacactccgccgaggcaaggggcaatcggatggccgaccaggccgccagaaaggctgctattactgaaactcccgacacttccactctgctgattgaaaactcctccccttctggcggctcaaaaagaaccgccgacggcagcgaattcgagtctcccaagaagaagaggaaagtcggctctggccctgccgctaagagagtgaagctggactgagcggccgcttaattaagctgccttctgcggggcttgccttctggccatgcccttcttctctcccttgcacctgtacctcttggtctttgaataaagcctgagtaggaagtctagaaaaaaaaaaaaaaaaaaaaaaaaaaaaaaaaaaaaaaaaaaaaaaaaaaaaaaaaaaaaaaaaaaaaaaaaaaaaaaaaaaaaaaaaaaaaaaaaaaaaaaaaaaaaaaaaaaaaaaaagaagagccatcccttcagagtgttccatcccaatacgcgtcaattcactggccgtcgttttacaacgtcgtgactgggaaaaccctggcgttacccaacttaatcgccttgcagcacatccccctttcgccagctggcgtaatagcgaagaggcccgcaccgatcgcccttcccaacagttgcgcagcctgaatggcgaatggcgcctgatgcggtattttctccttacgcatctgtgcggtatttcacaccgcatatggtgcactctcagtacaatctgctctgatgccgcatagttaagccagccccgacacccgccaacacccgctgacgcgccctgacgggcttgtctgctcccggcatccgcttacagacaagctgtgacagtctccgggagctgcatgtgtcagaggttttcaccgtcatcaccgaaacgcgcga

SEQ ID NO: 57 - RNA, 4444 nt, synthetic construct
  source 1..4444: mol_type = other RNA
aggaaataagagagaaaagaagagtaagaagaaatataagagccaccatggccccaaagaagaagcggaaggtcggtatccacggagtcccagcagccgacaagaagtacagcatcggcctggacatcggcaccaactctgtgggctgggccgtgatcaccgacgagtacaaggtgcccagcaagaaattcaaggtgctgggcaacaccgaccggcacagcatcaagaagaacctgatcggagccctgctgttcgacagcggcgaaacagccgaggccacccggctgaagagaaccgccagaagaagatacaccagacggaagaaccggatctgctatctgcaagagatcttcagcaacgagatggccaaggtggacgacagcttcttccacagactggaagagtccttcctggtggaagaggacaagaagcacgagagacaccccatcttcggcaacatcgtggacgaggtggcctaccacgagaagtaccccaccatctaccacctgagaaagaaactggtggacagcaccgacaaggccgacctgagactgatctacctggccctggcccacatgatcaagttcagaggccacttcctgatcgagggcgacctgaaccccgacaacagcgacgtggacaagctgttcatccagctggtgcagacctacaaccagctgttcgaggaaaaccccatcaacgccagcggcgtggacgccaaggctatcctgtctgccagactgagcaagagcagaaggctggaaaatctgatcgcccagctgcccggcgagaagaagaacggcctgttcggcaacctgattgccctgagcctgggcctgacccccaacttcaagagcaacttcgacctggccgaggatgccaaactgcagctgagcaaggacacctacgacgacgacctggacaacctgctggcccagatcggcgaccagtacgccgacctgttcctggccgccaagaacctgtctgacgccatcctgctgagcgacatcctgagagtgaacaccgagatcaccaaggcccccctgagcgcctctatgatcaagagatacgacgagcaccaccaggacctgaccctgctgaaagctctcgtgcggcagcagctgcctgagaagtacaaagaaatcttcttcgaccagagcaagaacggctacgccggctacatcgatggcggcgctagccaggaagagttctacaagttcatcaagcccatcctggaaaagatggacggcaccgaggaactgctcgtgaagctgaacagagaggacctgctgagaaagcagagaaccttcgacaacggcagcatcccccaccagatccacctgggagagctgcacgctatcctgagaaggcaggaagatttttacccattcctgaaggacaaccgggaaaagatcgagaagatcctgaccttcaggatcccctactacgtgggccccctggccagaggcaacagcagattcgcctggatgaccagaaagagcgaggaaaccatcaccccctggaacttcgaggaagtggtggacaagggcgccagcgcccagagcttcatcgagagaatgacaaacttcgataagaacctgcccaacgagaaggtgctgcccaagcacagcctgctgtacgagtacttcaccgtgtacaacgagctgaccaaagtgaaatacgtgaccgagggaatgagaaagcccgccttcctgagcggcgagcagaaaaaggccatcgtggacctgctgttcaagaccaacagaaaagtgaccgtgaagcagctgaaagaggactacttcaagaaaatcgagtgcttcgactccgtggaaatctccggcgtggaagatagattcaacgcctccctgggcacataccacgatctgctgaaaattatcaaggacaaggacttcctggataacgaagagaacgaggacattctggaagatatcgtgctgaccctgacactgtttgaggaccgcgagatgatcgaggaaaggctgaaaacctacgctcacctgttcgacgacaaagtgatgaagcagctgaagagaaggcggtacaccggctggggcaggctgagcagaaagctgatcaacggcatcagagacaagcagagcggcaagacaatcctggatttcctgaagtccgacggcttcgccaaccggaacttcatgcagctgatccacgacgacagcctgacattcaaagaggacatccagaaagcccaggtgtccggccagggcgactctctgcacgagcatatcgctaacctggccggcagccccgctatcaagaagggcatcctgcagacagtgaaggtggtggacgagctcgtgaaagtgatgggcagacacaagcccgagaacatcgtgatcgagatggctagagagaaccagaccacccagaagggacagaagaactcccgcgagaggatgaagagaatcgaagagggcatcaaagagctgggcagccagatcctgaaagaacaccccgtggaaaacacccagctgcagaacgagaagctgtacctgtactacctgcagaatggccgggatatgtacgtggaccaggaactggacatcaacagactgtccgactacgatgtggaccatatcgtgcctcagagctttctgaaggacgactccatcgataacaaagtgctgactcggagcgacaagaacagaggcaagagcgacaacgtgccctccgaagaggtcgtgaagaagatgaagaactactggcgacagctgctgaacgccaagctgattacccagaggaagttcgataacctgaccaaggccgagagaggcggcctgagcgagctggataaggccggcttcatcaagaggcagctggtggaaaccagacagatcacaaagcacgtggcacagatcctggactcccggatgaacactaagtacgacgaaaacgataagctgatccgggaagtgaaagtgatcaccctgaagtccaagctggtgtccgatttccggaaggatttccagttttacaaagtgcgcgagatcaacaactaccaccacgcccacgacgcctacctgaacgccgtcgtgggaaccgccctgatcaaaaagtaccctaagctggaaagcgagttcgtgtacggcgactacaaggtgtacgacgtgcggaagatgatcgccaagagcgagcaggaaatcggcaaggctaccgccaagtacttcttctacagcaacatcatgaactttttcaagaccgaaatcaccctggccaacggcgagatcagaaagcgccctctgatcgagacaaacggcgaaaccggggagatcgtgtgggataagggcagagacttcgccacagtgcgaaaggtgctgagcatgccccaagtgaatatcgtgaaaaagaccgaggtgcagacaggcggcttcagcaaagagtctatcctgcccaagaggaacagcgacaagctgatcgccagaaagaaggactgggaccccaagaagtacggcggcttcgacagccctaccgtggcctactctgtgctggtggtggctaaggtggaaaagggcaagtccaagaaactgaagagtgtgaaagagctgctggggatcaccatcatggaaagaagcagctttgagaagaaccctatcgactttctggaagccaagggctacaaagaagtgaaaaaggacctgatcatcaagctgcctaagtactccctgttcgagctggaaaacggcagaaagagaatgctggcctctgccggcgaactgcagaagggaaacgagctggccctgcctagcaaatatgtgaacttcctgtacctggcctcccactatgagaagctgaagggcagccctgaggacaacgaacagaaacagctgtttgtggaacagcataagcactacctggacgagatcatcgagcagatcagcgagttctccaagagagtgatcctggccgacgccaatctggacaaggtgctgtctgcctacaacaagcacagggacaagcctatcagagagcaggccgagaatatcatccacctgttcaccctgacaaacctgggcgctcctgccgccttcaagtactttgacaccaccatcgaccggaagaggtacaccagcaccaaagaggtgctggacgccaccctgatccaccagagcatcaccggcctgtacgagacaagaatcgacctgtctcagctgggaggcgacaagagacctgccgccactaagaaggccggacaggccaaaaagaagaagtgagcggccgcttaattaagctgccttctgcggggcttgccttctggccatgcccttcttctctcccttgcacctgtacctcttggtctttgaataaagcctgagtaggaagtctagaaaaaaaaaaaaaaaaaaaaaaaaaaaaaaaaaaaaaaaaaaaaaaaaaaaaaaaaaaaaaaaaaaaaaaaaaaaaaaaa

SEQ ID NO: 58 - RNA, 4506 nt, synthetic construct
  source 1..4506: mol_type = other RNA
agaggaaataagagagaaaagaagagtaagaagaaatataagagccaccatggcccctaagaagaagagaaaagtcggaattcacggagtccccgccgccgacaaaaagtactccattggccttgatattggaaccaactccgtgggttgggccgtgatcactgacgagtacaaggtgccgtccaagaagttcaaggtgctggggaacactgaccggcactcaattaagaagaacctgattggggcgctgctgttcgactccggagaaaccgcggaggctacccgcctgaagcggactgcccggcggagatacacgcgcaggaagaaccggatttgctacctccaagaaatcttcagcaacgaaatggcaaaggtggacgattccttcttccatcgcctggaagagagcttcctggtggaagaggacaagaagcacgaaagacacccgattttcggcaacatcgtggatgaggtcgcataccacgaaaagtaccccaccatctatcatcttcggaagaagctggtcgactccaccgataaggccgatctgcgcctgatctacttggcgctggctcacatgattaagttcagaggacactttctgatagagggcgacctcaatcccgataactccgacgtggataagctgttcatccaactggtgcagacgtacaaccaactgtttgaagagaatccaatcaacgccagcggggtggacgccaaggccatcctgtccgcccggctgtcaaagtccagacgcctggagaatctcatcgcgcaactccctggcgaaaaaaagaacggactcttcgggaatctgattgctctgtccctggggctcactccgaacttcaagtcgaacttcgacctggcggaggacgctaagctgcagctgtccaaggacacctacgatgacgatctggataaccttctggcccagatcggggatcaatacgccgatctcttcctggccgcaaagaacttgtcggatgctattctgctgagcgacattctgcgggtcaatactgaaatcaccaaggcgcccctgtcggccagcatgatcaagcgctacgacgaacaccaccaagacctgactctgctgaaggccctcgtgcgccagcagctgcctgaaaagtacaaggagattttcttcgaccagtccaagaacggatacgccggatacattgacggaggggccagccaggaggaattttacaaattcatcaagcccattctcgagaaaatggacggaaccgaagagttgctcgtgaagctgaacagagaggatctcctccggaagcagcggaccttcgacaacggttccatcccgcaccaaatccacctgggcgaattgcacgccatcctccggcggcaggaagatttctacccattcttgaaggacaatcgcgaaaagatcgaaaagatcttgactttccgcatcccgtactacgtgggccctctggcccgcggcaactcccgcttcgcttggatgacacggaagtccgaggaaaccattacgccctggaacttcgaggaagtggtggacaagggggcgtccgcccagagcttcatcgaacgcatgaccaatttcgacaagaacctcccgaacgaaaaagtgctgccaaagcactcgctcctctacgaatacttcaccgtgtacaacgagctgactaaggtcaaatacgtgactgagggaatgcggaagccggccttcctgtcgggagagcagaagaaggccatagtggacttgcttttcaagactaaccggaaggtcactgtgaagcaactcaaggaggactacttcaagaagatcgagtgtttcgactcggtggagatctcgggtgtcgaggaccgcttcaacgcctccctgggaacttaccacgatctgctgaagatcatcaaggacaaggacttcctcgataacgaagaaaatgaggacatcctcgaggatatcgtgctgaccctgaccttgttcgaggatagggagatgatcgaggagcggctcaagacctacgcccacctgtttgacgacaaagtgatgaagcaactgaaacggcggaggtataccggctggggtcggctgtcccgcaagctgatcaacgggatcagggacaagcagtccggaaagaccatcctcgacttccttaagtccgacggattcgcgaaccgcaacttcatgcaacttatccacgacgactcgctgacattcaaggaagatatccagaaggcccaggtgtccggacagggggactcgcttcatgagcacatcgctaacctggccggatcccccgccataaaaaagggcattctgcagaccgtcaaagtggtggatgagctggtcaaggtcatgggccggcataagccggaaaacatcgtcatcgagatggcccgcgagaaccagactacgcagaagggccagaagaactcccgggagcggatgaagcggattgaagagggcatcaaggagctcggcagccagattctgaaggaacatcccgtggaaaacacccagctgcaaaacgaaaagctctatttgtactatctgcaaaacggacgcgatatgtacgtggatcaggagctggacattaacagactgagcgactatgacgtggatcacattgtgcctcaaagcttcctcaaggacgactcaattgacaacaaggtcctgaccagaagcgacaagaacagaggaaagtcggataatgtgccgtccgaagaagtggtcaagaagatgaagaattactggagacagctcctgaatgcgaagctcattacccagcggaagttcgataacctgaccaaggccgaaaggggtggactgtccgaactcgacaaagctggcttcatcaagcgccaactggtcgaaaccaggcagatcaccaagcacgtcgcccagattctggacagccgcatgaacactaagtacgacgagaacgataagctgatccgcgaagtgaaggtcatcaccctgaagtccaagctcgtgtccgactttcggaaggatttccagttttacaaggtccgcgagatcaacaactaccatcacgcccacgacgcgtaccttaacgcagtcgtgggaacggctcttatcaagaagtacccaaagctggagtcggaatttgtgtacggagactacaaagtgtacgacgtgcgcaagatgatcgccaaatctgagcaagagatcgggaaggcaaccgccaaatacttcttctactcaaacattatgaattttttcaaaactgagattaccctggctaacggagaaattcggaagcgccccctgattgaaaccaacggagaaactggagaaattgtgtgggacaagggacgggacttcgccaccgtccgcaaggtcctctcaatgccccaagtcaacatcgtgaaaaagaccgaagtgcaaaccggcggcttctcaaaggagtccatcctgcctaagcgcaacagcgacaagctgattgccaggaagaaggactgggacccgaagaagtacggaggatttgattcccctaccgtggcctactccgtgctcgtggtggccaaagtggaaaaggggaaatccaagaagctgaagtcggtgaaggagcttttgggtatcaccatcatggaacgctcctcgttcgaaaagaacccaatcgatttcctggaagctaagggttataaggaagtgaaaaaggacctgattatcaagctgcccaagtactcactgttcgagctggaaaacggtcggaaaaggatgctggccagcgccggagaactccagaagggaaacgaactggcactgccgtccaaatacgtcaacttcctctaccttgcatcccattacgaaaaactcaagggatcgccggaggacaacgagcagaagcagcttttcgtggagcaacacaagcattacttggacgagatcatcgagcagatttccgagttctcaaagcgcgtgatcctggccgacgcaaatctggacaaggtcctgtccgcgtacaataagcatcgggacaagcctatccgcgaacaggccgagaacatcatccatctgttcactctgacaaacctgggcgcacccgccgcgttcaagtactttgacaccaccatcgataggaagcgatacacctcaactaaggaagtgttggacgcgacccttatccatcagtcgatcaccgggctgtacgaaacacggatcgacctcagccagttgggaggcgacaagcgccctgcggctaccaagaaggccggacaggccaagaagaagaaatgagcggccgcttaattaagctgccttctgcggggcttgccttctggccatgcccttcttctctcccttgcacctgtacctcttggtctttgaataaagcctgagtaggaagtctagaaaaaaaaaaaaaaaaaaaaaaaaaaaaaaaaaaaaaaaaaaaaaaaaaaaaaaaaaaaaaaaaaaaaaaaaaaaaaaaaaaaaaaaaaaaaaaaaaaaaaaaaaaaaaaaaaaaaaaaaaaaaaaaaaaaaaaaaaaaa

SEQ ID NO: 59 - protein, 17 aa, synthetic construct
KRTADGSEFEPKKKRKV

SEQ ID NO: 60 - protein, 19 aa, synthetic construct
NLSKRPAAIKKAGQAKKKK

SEQ ID NO: 61 - protein, 11 aa, synthetic construct
RQRRNELKRSF

SEQ ID NO: 62 - protein, 38 aa, synthetic construct
NQSSNFGPMKGGNFGGRSSGPYGGGGQYFAKPRNQGGY

SEQ ID NO: 63 - protein, 16 aa, synthetic construct
KRXXXXXXXXXXKKKL

SEQ ID NO: 64 - protein, 16 aa, synthetic construct
KRPAATKKAGQAKKKK

SEQ ID NO: 65 - protein, 7 aa, synthetic construct
PKKKRKV

SEQ ID NO: 66 - protein, 30 aa, synthetic construct
MDSLLMNRRKFLYQFKNVRWAKGRRETYLC

SEQ ID NO: 67 - protein, 20 aa, synthetic construct
AVKRPAATKKAGQAKKKKLD

SEQ ID NO: 68 - protein, 25 aa, synthetic construct
MSRRRKANPTKLSENAKKLAKEVEN

SEQ ID NO: 69 - protein, 9 aa, synthetic construct
KLKIKRPVK

SEQ ID NO: 70 - protein, 8 aa, synthetic construct
VSRKRPRP

SEQ ID NO: 71 - protein, 10 aa, synthetic construct
EGAPPAKRAR

SEQ ID NO: 72 - protein, 12 aa, synthetic construct
PPQPKKKPLDGE

SEQ ID NO: 73 - protein, 21 aa, synthetic construct
SGGSKRTADGSEFEPKKKRKV

SEQ ID NO: 74 - protein, 5 aa, synthetic construct
  REGION 1..5: note = The entire sequence of amino acids 1-5 can be repeated one or more times
GGGGS

SEQ ID NO: 75 - protein, 5 aa, synthetic construct
  REGION 1..5: note = The entire sequence of amino acids 1-5 can be repeated one or more times
EAAAK

SEQ ID NO: 76 - protein, 4 aa, synthetic construct
  REGION 1..4: note = The entire sequence of amino acids 1-5 can be repeated one or more times
SGGS

SEQ ID NO: 77 - protein, 16 aa, synthetic construct
SGSETPGTSESATPES

SEQ ID NO: 78 - protein, 32 aa, synthetic construct
SGGSSGGSSGSETPGTSESATPESSGGSSGGS

SEQ ID NO: 79 - protein, 10 aa, synthetic construct
SGGSGGSGGS

SEQ ID NO: 80 - protein, 60 aa, synthetic construct
SGGSSGGSSGSETPGTSESATPESAGSYPYDVPDYAGSAAPAAKKKKLDGSGSGGSSGGS

SEQ ID NO: 81 - protein, 6 aa, synthetic construct
GGSGGS

SEQ ID NO: 82 - protein, 9 aa, synthetic construct
GGSGGSGGS

SEQ ID NO: 83 - protein, 33 aa, synthetic construct
SGGSSGGSSGSETPGTSESATPESSGGSSGGSS

SEQ ID NO: 84 - RNA, 42 nt, synthetic construct
  source 1..42: mol_type = other RNA
ttgacgcggttctatctagttacgcgttaaaccaactagaaa

SEQ ID NO: 85 - RNA, 44 nt, synthetic construct
  source 1..44: mol_type = other RNA
cgcgagtctaggggataacgcgttaaacttcctagaaggcggtt

SEQ ID NO: 86 - RNA, 44 nt, synthetic construct
  source 1..44: mol_type = other RNA
cgcggatctagattgtaacgcgttaaaccatctagaaggcggtt

SEQ ID NO: 87 - RNA, 44 nt, synthetic construct
  source 1..44: mol_type = other RNA
cgcgtcgctaccgcccggcgcgttaaacacactagaaggcggtt

SEQ ID NO: 88 - RNA, 37 nt, synthetic construct
  source 1..37: mol_type = other RNA
cgcggttctatctagttacgcgttaaaccaactagaa

SEQ ID NO: 89 - RNA, 42 nt, synthetic construct
  source 1..42: mol_type = other RNA
ttgacgcgcttctatctagttacgcgttaaaccaactagaaa

SEQ ID NO: 90 - RNA, 42 nt, synthetic construct
  source 1..42: mol_type = other RNA
ttgacgcggttctatctacttacgcgttaaaccaactagaaa

SEQ ID NO: 91 - RNA, 13 nt, synthetic construct
  source 1..13: mol_type = other RNA
ggcgtggcagtca

SEQ ID NO: 92 - RNA, 12 nt, synthetic construct
  source 1..12: mol_type = other RNA
ggcgtggcagtc

SEQ ID NO: 93 - RNA, 11 nt, synthetic construct
  source 1..11: mol_type = other RNA
ggcgtggcagt

SEQ ID NO: 94 - RNA, 10 nt, synthetic construct
  source 1..10: mol_type = other RNA
ggcgtggcag

SEQ ID NO: 95 - RNA, 21 nt, synthetic construct
  source 1..21: mol_type = other RNA
gccagcagtgaacaccccttg

SEQ ID NO: 96 - RNA, 17 nt, synthetic construct
  source 1..17: mol_type = other RNA
gcagtgaacaccccttg

SEQ ID NO: 97 - RNA, 14 nt, synthetic construct
  source 1..14: mol_type = other RNA
gtgaacaccccttg

SEQ ID NO: 98 - RNA, 12 nt, synthetic construct
  source 1..12: mol_type = other RNA
gaacaccccttg

SEQ ID NO: 99 - RNA, 134 nt, synthetic construct; identical to SEQ ID NO: 16
  modified_base 1: mod_base = um
  modified_base 2: mod_base = OTHER; note = Phosphorothioate (PS) linkage
  modified_base 2: mod_base = um
  modified_base 3: mod_base = OTHER; note = Phosphorothioate (PS) linkage
  modified_base 3: mod_base = gm
  modified_base 4: mod_base = OTHER; note = Phosphorothioate (PS) linkage
  modified_base 29: mod_base = gm
  modified_base 30: mod_base = cm
  modified_base 31: mod_base = um
  modified_base 32: mod_base = OTHER; note = 2'-O-methyladenosine
  modified_base 33: mod_base = gm
  modified_base 34: mod_base = OTHER; note = 2'-O-methyladenosine
  modified_base 35: mod_base = OTHER; note = 2'-O-methyladenosine
  modified_base 36: mod_base = OTHER; note = 2'-O-methyladenosine
  modified_base 37: mod_base = um
  modified_base 38: mod_base = OTHER; note = 2'-O-methyladenosine
  modified_base 39: mod_base = gm
  modified_base 40: mod_base = cm
  modified_base 68: mod_base = OTHER; note = 2'-O-methyladenosine
  modified_base 69: mod_base = OTHER; note = 2'-O-methyladenosine
  modified_base 70: mod_base = cm
  modified_base 71: mod_base = um
  modified_base 72: mod_base = um
  modified_base 73: mod_base = gm
  modified_base 74: mod_base = OTHER; note = 2'-O-methyladenosine
  modified_base 75: mod_base = OTHER; note = 2'-O-methyladenosine
  modified_base 76: mod_base = OTHER; note = 2'-O-methyladenosine
  modified_base 77: mod_base = OTHER; note = 2'-O-methyladenosine
  modified_base 78: mod_base = OTHER; note = 2'-O-methyladenosine
  modified_base 79: mod_base = gm
  modified_base 80: mod_base = um
  modified_base 81: mod_base = gm
  modified_base 82: mod_base = gm
  modified_base 83: mod_base = cm
  modified_base 84: mod_base = OTHER; note = 2'-O-methyladenosine
  modified_base 85: mod_base = cm
  modified_base 86: mod_base = cm
  modified_base 87: mod_base = gm
  modified_base 88: mod_base = OTHER; note = 2'-O-methyladenosine
  modified_base 89: mod_base = gm
  modified_base 90: mod_base = um
  modified_base 91: mod_base = cm
  modified_base 92: mod_base = gm
  modified_base 93: mod_base = gm
  modified_base 94: mod_base = um
  modified_base 95: mod_base = gm
  modified_base 96: mod_base = cm
  modified_base 131: mod_base = um
  modified_base 132: mod_base = OTHER; note = Phosphorothioate (PS) linkage
  modified_base 132: mod_base = um
  modified_base 133: mod_base = OTHER; note = Phosphorothioate (PS) linkage
  modified_base 133: mod_base = um
  modified_base 134: mod_base = OTHER; note = Phosphorothioate (PS) linkage
  modified_base 134: mod_base = um
  source 1..134: mol_type = other RNA

SEQ ID NO: 100 - RNA, 133 nt, synthetic construct; identical to SEQ ID NO: 17
  modified_base 1: mod_base = um
  modified_base 2: mod_base = OTHER; note = Phosphorothioate (PS) linkage
  modified_base 2: mod_base = um
  modified_base 3: mod_base = OTHER; note = Phosphorothioate (PS) linkage
  modified_base 3: mod_base = gm
  modified_base 4: mod_base = OTHER; note = Phosphorothioate (PS) linkage
  modified_base 29: mod_base = gm
  modified_base 30: mod_base = cm
  modified_base 31: mod_base = um
  modified_base 32: mod_base = OTHER; note = 2'-O-methyladenosine
  modified_base 33: mod_base = gm
  modified_base 34: mod_base = OTHER; note = 2'-O-methyladenosine
  modified_base 35: mod_base = OTHER; note = 2'-O-methyladenosine
  modified_base 36: mod_base = OTHER; note = 2'-O-methyladenosine
  modified_base 37: mod_base = um
  modified_base 38: mod_base = OTHER; note = 2'-O-methyladenosine
  modified_base 39: mod_base = gm
  modified_base 40: mod_base = cm
  modified_base 68: mod_base = OTHER; note = 2'-O-methyladenosine
  modified_base 69: mod_base = OTHER; note = 2'-O-methyladenosine
  modified_base 70: mod_base = cm
  modified_base 71: mod_base = um
  modified_base 72: mod_base = um
  modified_base 73: mod_base = gm
  modified_base 74: mod_base = OTHER; note = 2'-O-methyladenosine
  modified_base 75: mod_base = OTHER; note = 2'-O-methyladenosine
  modified_base 76: mod_base = OTHER; note = 2'-O-methyladenosine
  modified_base 77: mod_base = OTHER; note = 2'-O-methyladenosine
  modified_base 78: mod_base = OTHER; note = 2'-O-methyladenosine
  modified_base 79: mod_base = gm
  modified_base 80: mod_base = um
  modified_base 81: mod_base = gm
  modified_base 82: mod_base = gm
  modified_base 83: mod_base = cm
  modified_base 84: mod_base = OTHER; note = 2'-O-methyladenosine
  modified_base 85: mod_base = cm
  modified_base 86: mod_base = cm
  modified_base 87: mod_base = gm
  modified_base 88: mod_base = OTHER; note = 2'-O-methyladenosine
  modified_base 89: mod_base = gm
  modified_base 90: mod_base = um
  modified_base 91: mod_base = cm
  modified_base 92: mod_base = gm
  modified_base 93: mod_base = gm
  modified_base 94: mod_base = um
  modified_base 95: mod_base = gm
  modified_base 96: mod_base = cm
  modified_base 130: mod_base = um
  modified_base 131: mod_base = OTHER; note = Phosphorothioate (PS) linkage
  modified_base 131: mod_base = um
  modified_base 132: mod_base = OTHER; note = Phosphorothioate (PS) linkage
  modified_base 132: mod_base = um
  modified_base 133: mod_base = OTHER; note = Phosphorothioate (PS) linkage
  modified_base 133: mod_base = um
  source 1..133: mol_type = other RNA

SEQ ID NO: 101 - RNA, 132 nt, synthetic construct; identical to SEQ ID NO: 18
  modified_base 1: mod_base = um
  modified_base 2: mod_base = OTHER; note = Phosphorothioate (PS) linkage
  modified_base 2: mod_base = um
  modified_base 3: mod_base = OTHER; note = Phosphorothioate (PS) linkage
  modified_base 3: mod_base = gm
  modified_base 4: mod_base = OTHER; note = Phosphorothioate (PS) linkage
  modified_base 29: mod_base = gm
  modified_base 30: mod_base = cm
  modified_base 31: mod_base = um
  modified_base 32: mod_base = OTHER; note = 2'-O-methyladenosine
  modified_base 33: mod_base = gm
  modified_base 34: mod_base = OTHER; note = 2'-O-methyladenosine
  modified_base 35: mod_base = OTHER; note = 2'-O-methyladenosine
  modified_base 36: mod_base = OTHER; note = 2'-O-methyladenosine
  modified_base 37: mod_base = um
  modified_base 38: mod_base = OTHER; note = 2'-O-methyladenosine
  modified_base 39: mod_base = gm
  modified_base 40: mod_base = cm
  modified_base 68: mod_base = OTHER; note = 2'-O-methyladenosine
  modified_base 69: mod_base = OTHER; note = 2'-O-methyladenosine
  modified_base 70: mod_base = cm
  modified_base 71: mod_base = um
  modified_base 72: mod_base = um
  modified_base 73: mod_base = gm
  modified_base 74: mod_base = OTHER; note = 2'-O-methyladenosine
  modified_base 75: mod_base = OTHER; note = 2'-O-methyladenosine
  modified_base 76: mod_base = OTHER; note = 2'-O-methyladenosine
  modified_base 77: mod_base = OTHER; note = 2'-O-methyladenosine
  modified_base 78: mod_base = OTHER; note = 2'-O-methyladenosine
  modified_base 79: mod_base = gm
  modified_base 80: mod_base = um
  modified_base 81: mod_base = gm
  modified_base 82: mod_base = gm
  modified_base 83: mod_base = cm
  modified_base 84: mod_base = OTHER; note = 2'-O-methyladenosine
  modified_base 85: mod_base = cm
  modified_base 86: mod_base = cm
  modified_base 87: mod_base = gm
  modified_base 88: mod_base = OTHER; note = 2'-O-methyladenosine
  modified_base 89: mod_base = gm
  modified_base 90: mod_base = um
  modified_base 91: mod_base = cm
  modified_base 92: mod_base = gm
  modified_base 93: mod_base = gm
  modified_base 94: mod_base = um
  modified_base 95: mod_base = gm
  modified_base 96: mod_base = cm
  modified_base 129: mod_base = um
  modified_base 130: mod_base = OTHER; note = Phosphorothioate (PS) linkage
  modified_base 130: mod_base = um
  modified_base 131: mod_base = OTHER; note = Phosphorothioate (PS) linkage
  modified_base 131: mod_base = um
  modified_base 132: mod_base = OTHER; note = Phosphorothioate (PS) linkage
  modified_base 132: mod_base = um
  source 1..132: mol_type = other RNA

SEQ ID NO: 102 - RNA, 131 nt, synthetic construct; identical to SEQ ID NO: 19
  modified_base 1: mod_base = um
  modified_base 2: mod_base = OTHER; note = Phosphorothioate (PS) linkage
  modified_base 2: mod_base = um
  modified_base 3: mod_base = OTHER; note = Phosphorothioate (PS) linkage
  modified_base 3: mod_base = gm
  modified_base 4: mod_base = OTHER; note = Phosphorothioate (PS) linkage
  modified_base 29: mod_base = gm
  modified_base 30: mod_base = cm
  modified_base 31: mod_base = um
  modified_base 32: mod_base = OTHER; note = 2'-O-methyladenosine
  modified_base 33: mod_base = gm
  modified_base 34: mod_base = OTHER; note = 2'-O-methyladenosine
  modified_base 35: mod_base = OTHER; note = 2'-O-methyladenosine
  modified_base 36: mod_base = OTHER; note = 2'-O-methyladenosine
  modified_base 37: mod_base = um
  modified_base 38: mod_base = OTHER; note = 2'-O-methyladenosine
  modified_base 39: mod_base = gm
  modified_base 40: mod_base = cm
  modified_base 68: mod_base = OTHER; note = 2'-O-methyladenosine
  modified_base 69: mod_base = OTHER; note = 2'-O-methyladenosine
  modified_base 70: mod_base = cm
  modified_base 71: mod_base = um
  modified_base 72: mod_base = um
  modified_base 73: mod_base = gm
  modified_base 74: mod_base = OTHER; note = 2'-O-methyladenosine
  modified_base 75: mod_base = OTHER; note = 2'-O-methyladenosine
  modified_base 76: mod_base = OTHER; note = 2'-O-methyladenosine
  modified_base 77: mod_base = OTHER; note = 2'-O-methyladenosine
  modified_base 78: mod_base = OTHER; note = 2'-O-methyladenosine
  modified_base 79: mod_base = gm
  modified_base 80: mod_base = um
  modified_base 81: mod_base = gm
  modified_base 82: mod_base = gm
  modified_base 83: mod_base = cm
  modified_base 84: mod_base = OTHER; note = 2'-O-methyladenosine
  modified_base 85: mod_base = cm
  modified_base 86: mod_base = cm
  modified_base 87: mod_base = gm
  modified_base 88: mod_base = OTHER; note = 2'-O-methyladenosine
  modified_base 89: mod_base = gm
  modified_base 90: mod_base = um
  modified_base 91: mod_base = cm
  modified_base 92: mod_base = gm
  modified_base 93: mod_base = gm
  modified_base 94: mod_base = um
  modified_base 95: mod_base = gm
  modified_base 96: mod_base = cm
  modified_base 128: mod_base = um
  modified_base 129: mod_base = OTHER; note = Phosphorothioate (PS) linkage
  modified_base 129: mod_base = um
  modified_base 130: mod_base = OTHER; note = Phosphorothioate (PS) linkage
  modified_base 130: mod_base = um
  modified_base 131: mod_base = OTHER; note = Phosphorothioate (PS) linkage
  modified_base 131: mod_base = um
  source 1..131: mol_type = other RNA

SEQ ID NO: 103 - RNA, 130 nt, synthetic construct; identical to SEQ ID NO: 20
  modified_base 1: mod_base = um
  modified_base 2: mod_base = OTHER; note = Phosphorothioate (PS) linkage
  modified_base 2: mod_base = um
  modified_base 3: mod_base = OTHER; note = Phosphorothioate (PS) linkage
  modified_base 3: mod_base = gm
  modified_base 4: mod_base = OTHER; note = Phosphorothioate (PS) linkage
  modified_base 29: mod_base = gm
  modified_base 30: mod_base = cm
  modified_base 31: mod_base = um
  modified_base 32: mod_base = OTHER; note = 2'-O-methyladenosine
  modified_base 33: mod_base = gm
  modified_base 34: mod_base = OTHER; note = 2'-O-methyladenosine
  modified_base 35: mod_base = OTHER; note = 2'-O-methyladenosine
  modified_base 36: mod_base = OTHER; note = 2'-O-methyladenosine
  modified_base 37: mod_base = um
  modified_base 38: mod_base = OTHER; note = 2'-O-methyladenosine
  modified_base 39: mod_base = gm
  modified_base 40: mod_base = cm
  modified_base 68: mod_base = OTHER; note = 2'-O-methyladenosine
  modified_base 69: mod_base = OTHER; note = 2'-O-methyladenosine
  modified_base 70: mod_base = cm
  modified_base 71: mod_base = um
  modified_base 72: mod_base = um
  modified_base 73: mod_base = gm
  modified_base 74: mod_base = OTHER; note = 2'-O-methyladenosine
  modified_base 75: mod_base = OTHER; note = 2'-O-methyladenosine
  modified_base 76: mod_base = OTHER; note = 2'-O-methyladenosine
  modified_base 77: mod_base = OTHER; note = 2'-O-methyladenosine
  modified_base 78: mod_base = OTHER; note = 2'-O-methyladenosine
  modified_base 79: mod_base = gm
  modified_base 80: mod_base = um
  modified_base 81: mod_base = gm
  modified_base 82: mod_base = gm
  modified_base 83: mod_base = cm
  modified_base 84: mod_base = OTHER; note = 2'-O-methyladenosine
  modified_base 85: mod_base = cm
  modified_base 86: mod_base = cm
  modified_base 87: mod_base = gm
  modified_base 88: mod_base = OTHER; note = 2'-O-methyladenosine
  modified_base 89: mod_base = gm
  modified_base 90: mod_base = um
  modified_base 91: mod_base = cm
  modified_base 92: mod_base = gm
  modified_base 93: mod_base = gm
  modified_base 94: mod_base = um
  modified_base 95: mod_base = gm
  modified_base 96: mod_base = cm
  modified_base 127: mod_base = um
  modified_base 128: mod_base = OTHER; note = Phosphorothioate (PS) linkage
  modified_base 128: mod_base = um
  modified_base 129: mod_base = OTHER; note = Phosphorothioate (PS) linkage
  modified_base 129: mod_base = um
  modified_base 130: mod_base = OTHER; note = Phosphorothioate (PS) linkage
  modified_base 130: mod_base = um
  source 1..130: mol_type = other RNA

SEQ ID NO: 104 - RNA, 129 nt, synthetic construct; identical to SEQ ID NO: 21
  modified_base 1: mod_base = um
  modified_base 2: mod_base = OTHER; note = Phosphorothioate (PS) linkage
  modified_base 2: mod_base = um
  modified_base 3: mod_base = OTHER; note = Phosphorothioate (PS) linkage
  modified_base 3: mod_base = gm
  modified_base 4: mod_base = OTHER; note = Phosphorothioate (PS) linkage
  modified_base 29: mod_base = gm
  modified_base 30: mod_base = cm
  modified_base 31: mod_base = um
  modified_base 32: mod_base = OTHER; note = 2'-O-methyladenosine
  modified_base 33: mod_base = gm
  modified_base 34: mod_base = OTHER; note = 2'-O-methyladenosine
  modified_base 35: mod_base = OTHER; note = 2'-O-methyladenosine
  modified_base 36: mod_base = OTHER; note = 2'-O-methyladenosine
  modified_base 37: mod_base = um
  modified_base 38: mod_base = OTHER; note = 2'-O-methyladenosine
  modified_base 39: mod_base = gm
  modified_base 40: mod_base = cm
  modified_base 68: mod_base = OTHER; note = 2'-O-methyladenosine
  modified_base 69: mod_base = OTHER; note = 2'-O-methyladenosine
  modified_base 70: mod_base = cm
  modified_base 71: mod_base = um
  modified_base 72: mod_base = um
  modified_base 73: mod_base = gm
  modified_base 74: mod_base = OTHER; note = 2'-O-methyladenosine
  modified_base 75: mod_base = OTHER; note = 2'-O-methyladenosine
  modified_base 76: mod_base = OTHER; note = 2'-O-methyladenosine
  modified_base 77: mod_base = OTHER; note = 2'-O-methyladenosine
  modified_base 78: mod_base = OTHER; note = 2'-O-methyladenosine
  modified_base 79: mod_base = gm
  modified_base 80: mod_base = um
  modified_base 81: mod_base = gm
  modified_base 82: mod_base = gm
  modified_base 83: mod_base = cm
  modified_base 84: mod_base = OTHER; note = 2'-O-methyladenosine
  modified_base 85: mod_base = cm
  modified_base 86: mod_base = cm
  modified_base 87: mod_base = gm
  modified_base 88: mod_base = OTHER; note = 2'-O-methyladenosine
  modified_base 89: mod_base = gm
  modified_base 90: mod_base = um
  modified_base 91: mod_base = cm
  modified_base 92: mod_base = gm
  modified_base 93: mod_base = gm
  modified_base 94: mod_base = um
  modified_base 95: mod_base = gm
  modified_base 96: mod_base = cm
  modified_base 126: mod_base = um
  modified_base 127: mod_base = OTHER; note = Phosphorothioate (PS) linkage
  modified_base 127: mod_base = um
  modified_base 128: mod_base = OTHER; note = Phosphorothioate (PS) linkage
  modified_base 128: mod_base = um
  modified_base 129: mod_base = OTHER; note = Phosphorothioate (PS) linkage
  modified_base 129: mod_base = um
  source 1..129: mol_type = other RNA

SEQ ID NO: 105 - RNA, 128 nt, synthetic construct; identical to SEQ ID NO: 22
  modified_base 1: mod_base = um
  modified_base 2: mod_base = OTHER; note = Phosphorothioate (PS) linkage
  modified_base 2: mod_base = um
  modified_base 3: mod_base = OTHER; note = Phosphorothioate (PS) linkage
  modified_base 3: mod_base = gm
  modified_base 4: mod_base = OTHER; note = Phosphorothioate (PS) linkage
  modified_base 29: mod_base = gm
  modified_base 30: mod_base = cm
  modified_base 31: mod_base = um
  modified_base 32: mod_base = OTHER; note = 2'-O-methyladenosine
  modified_base 33: mod_base = gm
  modified_base 34: mod_base = OTHER; note = 2'-O-methyladenosine
  modified_base 35: mod_base = OTHER; note = 2'-O-methyladenosine
  modified_base 36: mod_base = OTHER; note = 2'-O-methyladenosine
  modified_base 37: mod_base = um
  modified_base 38: mod_base = OTHER; note = 2'-O-methyladenosine
  modified_base 39: mod_base = gm
  modified_base 40: mod_base = cm
  modified_base 68: mod_base = OTHER; note = 2'-O-methyladenosine
  modified_base 69: mod_base = OTHER; note = 2'-O-methyladenosine
  modified_base 70: mod_base = cm
  modified_base 71: mod_base = um
  modified_base 72: mod_base = um
  modified_base 73: mod_base = gm
  modified_base 74: mod_base = OTHER; note = 2'-O-methyladenosine
  modified_base 75: mod_base = OTHER; note = 2'-O-methyladenosine
  modified_base 76: mod_base = OTHER; note = 2'-O-methyladenosine
  modified_base 77: mod_base = OTHER; note = 2'-O-methyladenosine
  modified_base 78: mod_base = OTHER; note = 2'-O-methyladenosine
  modified_base 79: mod_base = gm
  modified_base 80: mod_base = um
  modified_base 81: mod_base = gm
  modified_base 82: mod_base = gm
  modified_base 83: mod_base = cm
  modified_base 84: mod_base = OTHER; note = 2'-O-methyladenosine
  modified_base 85: mod_base = cm
  modified_base 86: mod_base = cm
  modified_base 87: mod_base = gm
  modified_base 88: mod_base = OTHER; note = 2'-O-methyladenosine
  modified_base 89: mod_base = gm
  modified_base 90: mod_base = um
  modified_base 91: mod_base = cm
  modified_base 92: mod_base = gm
  modified_base 93: mod_base = gm
  modified_base 94: mod_base = um
  modified_base 95: mod_base = gm
  modified_base 96: mod_base = cm
  modified_base 125: mod_base = um
  modified_base 126: mod_base = OTHER; note = Phosphorothioate (PS) linkage
  modified_base 126: mod_base = um
  modified_base 127: mod_base = OTHER; note = Phosphorothioate (PS) linkage
  modified_base 127: mod_base = um
  modified_base 128: mod_base = OTHER; note = Phosphorothioate (PS) linkage
  modified_base 128: mod_base = um
  source 1..128: mol_type = other RNA

SEQ ID NO: 106 - RNA, 127 nt, synthetic construct; identical to SEQ ID NO: 23
  modified_base 1: mod_base = um
  modified_base 2: mod_base = OTHER; note = Phosphorothioate (PS) linkage
  modified_base 2: mod_base = um
  modified_base 3: mod_base = OTHER; note = Phosphorothioate (PS) linkage
  modified_base 3: mod_base = gm
  modified_base 4: mod_base = OTHER; note = Phosphorothioate (PS) linkage
  modified_base 29: mod_base = gm
  modified_base 30: mod_base = cm
  modified_base 31: mod_base = um
  modified_base 32: mod_base = OTHER; note = 2'-O-methyladenosine
  modified_base 33: mod_base = gm
  modified_base 34: mod_base = OTHER; note = 2'-O-methyladenosine
  modified_base 35: mod_base = OTHER; note = 2'-O-methyladenosine
  modified_base 36: mod_base = OTHER; note = 2'-O-methyladenosine
  modified_base 37: mod_base = um
  modified_base 38: mod_base = OTHER; note = 2'-O-methyladenosine
  modified_base 39: mod_base = gm
  modified_base 40: mod_base = cm
  modified_base 68: mod_base = OTHER; note = 2'-O-methyladenosine
  modified_base 69: mod_base = OTHER; note = 2'-O-methyladenosine
  modified_base 70: mod_base = cm
  modified_base 71: mod_base = um
  modified_base 72: mod_base = um
  modified_base 73: mod_base = gm
  modified_base 74: mod_base = OTHER; note = 2'-O-methyladenosine
  modified_base 75: mod_base = OTHER; note = 2'-O-methyladenosine
  modified_base 76: mod_base = OTHER; note = 2'-O-methyladenosine
  modified_base 77: mod_base = OTHER; note = 2'-O-methyladenosine
  modified_base 78: mod_base = OTHER; note = 2'-O-methyladenosine
  modified_base 79: mod_base = gm
  modified_base 80: mod_base = um
  modified_base 81: mod_base = gm
  modified_base 82: mod_base = gm
  modified_base 83: mod_base = cm
  modified_base 84: mod_base = OTHER; note = 2'-O-methyladenosine
  modified_base 85: mod_base = cm
  modified_base 86: mod_base = cm
  modified_base 87: mod_base = gm
  modified_base 88: mod_base = OTHER; note = 2'-O-methyladenosine
  modified_base 89: mod_base = gm
  modified_base 90: mod_base = um
  modified_base 91: mod_base = cm
  modified_base 92: mod_base = gm
  modified_base 93: mod_base = gm
  modified_base 94: mod_base = um
  modified_base 95: mod_base = gm
  modified_base 96: mod_base = cm
  modified_base 124: mod_base = um
  modified_base 125: mod_base = OTHER; note = Phosphorothioate (PS) linkage
  modified_base 125: mod_base = um
  modified_base 126: mod_base = OTHER; note = Phosphorothioate (PS) linkage
  modified_base 126: mod_base = um
  modified_base 127: mod_base = OTHER; note = Phosphorothioate (PS) linkage
  modified_base 127: mod_base = um
  source 1..127: mol_type = other RNA

SEQ ID NO: 107 - RNA, 130 nt, synthetic construct; identical to SEQ ID NO: 24
  modified_base 1: mod_base = um
  modified_base 2: mod_base = OTHER; note = Phosphorothioate (PS) linkage
  modified_base 2: mod_base = um
  modified_base 3: mod_base = OTHER; note = Phosphorothioate (PS) linkage
  modified_base 3: mod_base = gm
  modified_base 4: mod_base = OTHER; note = Phosphorothioate (PS) linkage
  modified_base 29: mod_base = gm
  modified_base 30: mod_base = cm
  modified_base 31: mod_base = um
  modified_base 32: mod_base = OTHER; note = 2'-O-methyladenosine
  modified_base 33: mod_base = gm
  modified_base 34: mod_base = OTHER; note = 2'-O-methyladenosine
  modified_base 35: mod_base = OTHER; note = 2'-O-methyladenosine
  modified_base 36: mod_base = OTHER; note = 2'-O-methyladenosine
  modified_base 37: mod_base = um
  modified_base 38: mod_base = OTHER; note = 2'-O-methyladenosine
  modified_base 39: mod_base = gm
  modified_base 40: mod_base = cm
  modified_base 68: mod_base = OTHER; note = 2'-O-methyladenosine
  modified_base 69: mod_base = OTHER; note = 2'-O-methyladenosine
  modified_base 70: mod_base = cm
  modified_base 71: mod_base = um
  modified_base 72: mod_base = um
  modified_base 73: mod_base = gm
  modified_base 74: mod_base = OTHER; note = 2'-O-methyladenosine
  modified_base 75: mod_base = OTHER; note = 2'-O-methyladenosine
  modified_base 76: mod_base = OTHER; note = 2'-O-methyladenosine
  modified_base 77: mod_base = OTHER; note = 2'-O-methyladenosine
  modified_base 78: mod_base = OTHER; note = 2'-O-methyladenosine
  modified_base 79: mod_base = gm
  modified_base 80: mod_base = um
  modified_base 81: mod_base = gm
  modified_base 82: mod_base = gm
  modified_base 83: mod_base = cm
  modified_base 84: mod_base = OTHER; note = 2'-O-methyladenosine
  modified_base 85: mod_base = cm
  modified_base 86: mod_base = cm
  modified_base 87: mod_base = gm
  modified_base 88: mod_base = OTHER; note = 2'-O-methyladenosine
  modified_base 89: mod_base = gm
  modified_base 90: mod_base = um
  modified_base 91: mod_base = cm
  modified_base 92: mod_base = gm
  modified_base 93: mod_base = gm
  modified_base 94: mod_base = um
  modified_base 95: mod_base = gm
  modified_base 96: mod_base = cm
  modified_base 127: mod_base = um
  modified_base 128: mod_base = OTHER; note = Phosphorothioate (PS) linkage
  modified_base 128: mod_base = um
  modified_base 129: mod_base = OTHER; note = Phosphorothioate (PS) linkage
  modified_base 129: mod_base = um
  modified_base 130: mod_base = OTHER; note = Phosphorothioate (PS) linkage
  modified_base 130: mod_base = um
  source 1..130: mol_type = other RNA

SEQ ID NO: 108 - RNA, 129 nt, synthetic construct; identical to SEQ ID NO: 25
  modified_base 1: mod_base = um
  modified_base 2: mod_base = OTHER; note = Phosphorothioate (PS) linkage
  modified_base 2: mod_base = um
  modified_base 3: mod_base = OTHER; note = Phosphorothioate (PS) linkage
  modified_base 3: mod_base = gm
  modified_base 4: mod_base = OTHER; note = Phosphorothioate (PS) linkage
  modified_base 29: mod_base = gm
  modified_base 30: mod_base = cm
  modified_base 31: mod_base = um
  modified_base 32: mod_base = OTHER; note = 2'-O-methyladenosine
  modified_base 33: mod_base = gm
  modified_base 34: mod_base = OTHER; note = 2'-O-methyladenosine
  modified_base 35: mod_base = OTHER; note = 2'-O-methyladenosine
  modified_base 36: mod_base = OTHER; note = 2'-O-methyladenosine
  modified_base 37: mod_base = um
  modified_base 38: mod_base = OTHER; note = 2'-O-methyladenosine
  modified_base 39: mod_base = gm
  modified_base 40: mod_base = cm
  modified_base 68: mod_base = OTHER; note = 2'-O-methyladenosine
  modified_base 69: mod_base = OTHER; note = 2'-O-methyladenosine
  modified_base 70: mod_base = cm
  modified_base 71: mod_base = um
  modified_base 72: mod_base = um
  modified_base 73: mod_base = gm
  modified_base 74: mod_base = OTHER; note = 2'-O-methyladenosine
  modified_base 75: mod_base = OTHER; note = 2'-O-methyladenosine
  modified_base 76: mod_base = OTHER; note = 2'-O-methyladenosine
  modified_base 77: mod_base = OTHER; note = 2'-O-methyladenosine
  modified_base 78: mod_base = OTHER; note = 2'-O-methyladenosine
  modified_base 79: mod_base = gm
  modified_base 80: mod_base = um
  modified_base 81: mod_base = gm
  modified_base 82: mod_base = gm
  modified_base 83: mod_base = cm
  modified_base 84: mod_base = OTHER; note = 2'-O-methyladenosine
  modified_base 85: mod_base = cm
  modified_base 86: mod_base = cm
  modified_base 87: mod_base = gm
  modified_base 88: mod_base = OTHER; note = 2'-O-methyladenosine
  modified_base 89: mod_base = gm
  modified_base 90: mod_base = um
  modified_base 91: mod_base = cm
  modified_base 92: mod_base = gm
  modified_base 93: mod_base = gm
  modified_base 94: mod_base = um
  modified_base 95: mod_base = gm
  modified_base 96: mod_base = cm
  modified_base 126: mod_base = um
  modified_base 127: mod_base = OTHER; note = Phosphorothioate (PS) linkage
  modified_base 127: mod_base = um
  modified_base 128: mod_base = OTHER; note = Phosphorothioate (PS) linkage
  modified_base 128: mod_base = um
  modified_base 129: mod_base = OTHER; note = Phosphorothioate (PS) linkage
  modified_base 129: mod_base = um
  source 1..129: mol_type = other RNA

SEQ ID NO: 109 - RNA, 128 nt, synthetic construct; identical to SEQ ID NO: 26
  modified_base 1: mod_base = um
  modified_base 2: mod_base = OTHER; note = Phosphorothioate (PS) linkage
  modified_base 2: mod_base = um
  modified_base 3: mod_base = OTHER; note = Phosphorothioate (PS) linkage
  modified_base 3: mod_base = gm
  modified_base 4: mod_base = OTHER; note = Phosphorothioate (PS) linkage
  modified_base 29: mod_base = gm
  modified_base 30: mod_base = cm
  modified_base 31: mod_base = um
  modified_base 32: mod_base = OTHER; note = 2'-O-methyladenosine
  modified_base 33: mod_base = gm
  modified_base 34: mod_base = OTHER; note = 2'-O-methyladenosine
  modified_base 35: mod_base = OTHER; note = 2'-O-methyladenosine
  modified_base 36: mod_base = OTHER; note = 2'-O-methyladenosine
  modified_base 37: mod_base = um
  modified_base 38: mod_base = OTHER; note = 2'-O-methyladenosine
  modified_base 39: mod_base = gm
  modified_base 40: mod_base = cm
  modified_base 68: mod_base = OTHER; note = 2'-O-methyladenosine
  modified_base 69: mod_base = OTHER; note = 2'-O-methyladenosine
  modified_base 70: mod_base = cm
  modified_base 71: mod_base = um
  modified_base 72: mod_base = um
  modified_base 73: mod_base = gm
  modified_base 74: mod_base = OTHER; note = 2'-O-methyladenosine
  modified_base 75: mod_base = OTHER; note = 2'-O-methyladenosine
  modified_base 76: mod_base = OTHER; note = 2'-O-methyladenosine
  modified_base 77: mod_base = OTHER; note = 2'-O-methyladenosine
  modified_base 78: mod_base = OTHER; note = 2'-O-methyladenosine
  modified_base 79: mod_base = gm
  modified_base 80: mod_base = um
  modified_base 81: mod_base = gm
  modified_base 82: mod_base = gm
  modified_base 83: mod_base = cm
  modified_base 84: mod_base = OTHER; note = 2'-O-methyladenosine
  modified_base 85: mod_base = cm
  modified_base 86: mod_base = cm
  modified_base 87: mod_base = gm
  modified_base 88: mod_base = OTHER; note = 2'-O-methyladenosine
  modified_base 89: mod_base = gm
  modified_base 90: mod_base = um
  modified_base 91: mod_base = cm
  modified_base 92: mod_base = gm
  modified_base 93: mod_base = gm
  modified_base 94: mod_base = um
  modified_base 95: mod_base = gm
  modified_base 96: mod_base = cm
  modified_base 125: mod_base = um
  modified_base 126: mod_base = OTHER; note = Phosphorothioate (PS) linkage
  modified_base 126: mod_base = um
  modified_base 127: mod_base = OTHER; note = Phosphorothioate (PS) linkage
  modified_base 127: mod_base = um
  modified_base 128: mod_base = OTHER; note = Phosphorothioate (PS) linkage
  modified_base 128: mod_base = um
  source 1..128: mol_type = other RNA

SEQ ID NO: 110 - RNA, 127 nt, synthetic construct; identical to SEQ ID NO: 27
  modified_base 1: mod_base = um
  modified_base 2: mod_base = OTHER; note = Phosphorothioate (PS) linkage
  modified_base 2: mod_base = um
  modified_base 3: mod_base = OTHER; note = Phosphorothioate (PS) linkage
  modified_base 3: mod_base = gm
  modified_base 4: mod_base = OTHER; note = Phosphorothioate (PS) linkage
  modified_base 29: mod_base = gm
  modified_base 30: mod_base = cm
  modified_base 31: mod_base = um
  modified_base 32: mod_base = OTHER; note = 2'-O-methyladenosine
  modified_base 33: mod_base = gm
  modified_base 34: mod_base = OTHER; note = 2'-O-methyladenosine
  modified_base 35: mod_base = OTHER; note = 2'-O-methyladenosine
  modified_base 36: mod_base = OTHER; note = 2'-O-methyladenosine
  modified_base 37: mod_base = um
  modified_base 38: mod_base = OTHER; note = 2'-O-methyladenosine
  modified_base 39: mod_base = gm
  modified_base 40: mod_base = cm
  modified_base 68: mod_base = OTHER; note = 2'-O-methyladenosine
  modified_base 69: mod_base = OTHER; note = 2'-O-methyladenosine
  modified_base 70: mod_base = cm
  modified_base 71: mod_base = um
  modified_base 72: mod_base = um
  modified_base 73: mod_base = gm
  modified_base 74: mod_base = OTHER; note = 2'-O-methyladenosine
  modified_base 75: mod_base = OTHER; note = 2'-O-methyladenosine
  modified_base 76: mod_base = OTHER; note = 2'-O-methyladenosine
  modified_base 77: mod_base = OTHER; note = 2'-O-methyladenosine
  modified_base 78: mod_base = OTHER; note = 2'-O-methyladenosine
  modified_base 79: mod_base = gm
  modified_base 80: mod_base = um
  modified_base 81: mod_base = gm
  modified_base 82: mod_base = gm
  modified_base 83: mod_base = cm
  modified_base 84: mod_base = OTHER; note = 2'-O-methyladenosine
  modified_base 85: mod_base = cm
  modified_base 86: mod_base = cm
  modified_base 87: mod_base = gm
  modified_base 88: mod_base = OTHER; note = 2'-O-methyladenosine
  modified_base 89: mod_base = gm
  modified_base 90: mod_base = um
  modified_base 91: mod_base = cm
  modified_base 92: mod_base = gm
  modified_base 93: mod_base = gm
  modified_base 94: mod_base = um
  modified_base 95: mod_base = gm
  modified_base 96: mod_base = cm
  modified_base 124: mod_base = um
  modified_base 125: mod_base = OTHER; note = Phosphorothioate (PS) linkage
  modified_base 125: mod_base = um
  modified_base 126: mod_base = OTHER; note = Phosphorothioate (PS) linkage
  modified_base 126: mod_base = um
  modified_base 127: mod_base = OTHER; note = Phosphorothioate (PS) linkage
  modified_base 127: mod_base = um
  source 1..127: mol_type = other RNA

SEQ ID NO: 111 - RNA, 126 nt, synthetic construct; identical to SEQ ID NO: 28
  modified_base 1: mod_base = um
  modified_base 2: mod_base = OTHER; note = Phosphorothioate (PS) linkage
  modified_base 2: mod_base = um
  modified_base 3: mod_base = OTHER; note = Phosphorothioate (PS) linkage
  modified_base 3: mod_base = gm
  modified_base 4: mod_base = OTHER; note = Phosphorothioate (PS) linkage
  modified_base 29: mod_base = gm
  modified_base 30: mod_base = cm
  modified_base 31: mod_base = um
  modified_base 32: mod_base = OTHER; note = 2'-O-methyladenosine
  modified_base 33: mod_base = gm
  modified_base 34: mod_base = OTHER; note = 2'-O-methyladenosine
  modified_base 35: mod_base = OTHER; note = 2'-O-methyladenosine
  modified_base 36: mod_base = OTHER; note = 2'-O-methyladenosine
  modified_base 37: mod_base = um
  modified_base 38: mod_base = OTHER; note = 2'-O-methyladenosine
  modified_base 39: mod_base = gm
  modified_base 40: mod_base = cm
  modified_base 68: mod_base = OTHER; note = 2'-O-methyladenosine
  modified_base 69: mod_base = OTHER; note = 2'-O-methyladenosine
  modified_base 70: mod_base = cm
  modified_base 71: mod_base = um
  modified_base 72: mod_base = um
  modified_base 73: mod_base = gm
  modified_base 74: mod_base = OTHER; note = 2'-O-methyladenosine
  modified_base 75: mod_base = OTHER; note = 2'-O-methyladenosine
  modified_base 76: mod_base = OTHER; note = 2'-O-methyladenosine
  modified_base 77: mod_base = OTHER; note = 2'-O-methyladenosine
  modified_base 78: mod_base = OTHER; note = 2'-O-methyladenosine
  modified_base 79: mod_base = gm
  modified_base 80: mod_base = um
  modified_base 81: mod_base = gm
  modified_base 82: mod_base = gm
  modified_base 83: mod_base = cm
  modified_base 84: mod_base = OTHER; note = 2'-O-methyladenosine
  modified_base 85: mod_base = cm
  modified_base 86: mod_base = cm
  modified_base 87: mod_base = gm
  modified_base 88: mod_base = OTHER; note = 2'-O-methyladenosine
  modified_base 89: mod_base = gm
  modified_base 90: mod_base = um
  modified_base 91: mod_base = cm
  modified_base 92: mod_base = gm
  modified_base 93: mod_base = gm
  modified_base 94: mod_base = um
  modified_base 95: mod_base = gm
  modified_base 96: mod_base = cm
  modified_base 123: mod_base = um
  modified_base 124: mod_base = OTHER; note = Phosphorothioate (PS) linkage
  modified_base 124: mod_base = um
  modified_base 125: mod_base = OTHER; note = Phosphorothioate (PS) linkage
  modified_base 125: mod_base = um
  modified_base 126: mod_base = OTHER; note = Phosphorothioate (PS) linkage
  modified_base 126: mod_base = um
  source 1..126: mol_type = other RNA

SEQ ID NO: 112 - RNA, 125 nt, synthetic construct; identical to SEQ ID NO: 29
  modified_base 1: mod_base = um
  modified_base 2: mod_base = OTHER; note = Phosphorothioate (PS) linkage
  modified_base 2: mod_base = um
  modified_base 3: mod_base = OTHER; note = Phosphorothioate (PS) linkage
  modified_base 3: mod_base = gm
  modified_base 4: mod_base = OTHER; note = Phosphorothioate (PS) linkage
  modified_base 29: mod_base = gm
  modified_base 30: mod_base = cm
  modified_base 31: mod_base = um
  modified_base 32: mod_base = OTHER; note = 2'-O-methyladenosine
  modified_base 33: mod_base = gm
  modified_base 34: mod_base = OTHER; note = 2'-O-methyladenosine
  modified_base 35: mod_base = OTHER; note = 2'-O-methyladenosine
  modified_base 36: mod_base = OTHER; note = 2'-O-methyladenosine
  modified_base 37: mod_base = um
  modified_base 38: mod_base = OTHER; note = 2'-O-methyladenosine
  modified_base 39: mod_base = gm
  modified_base 40: mod_base = cm
  modified_base 68: mod_base = OTHER; note = 2'-O-methyladenosine
  modified_base 69: mod_base = OTHER; note = 2'-O-methyladenosine
  modified_base 70: mod_base = cm
  modified_base 71: mod_base = um
  modified_base 72: mod_base = um
  modified_base 73: mod_base = gm
  modified_base 74: mod_base = OTHER; note = 2'-O-methyladenosine
  modified_base 75: mod_base = OTHER; note = 2'-O-methyladenosine
  modified_base 76: mod_base = OTHER; note = 2'-O-methyladenosine
  modified_base 77: mod_base = OTHER; note = 2'-O-methyladenosine
  modified_base 78: mod_base = OTHER; note = 2'-O-methyladenosine
  modified_base 79: mod_base = gm
  modified_base 80: mod_base = um
  modified_base 81: mod_base = gm
  modified_base 82: mod_base = gm
  modified_base 83: mod_base = cm
  modified_base 84: mod_base = OTHER; note = 2'-O-methyladenosine
  modified_base 85: mod_base = cm
  modified_base 86: mod_base = cm
  modified_base 87: mod_base = gm
  modified_base 88: mod_base = OTHER; note = 2'-O-methyladenosine
  modified_base 89: mod_base = gm
  modified_base 90: mod_base = um
  modified_base 91: mod_base = cm
  modified_base 92: mod_base = gm
  modified_base 93: mod_base = gm
  modified_base 94: mod_base = um
  modified_base 95: mod_base = gm
  modified_base 96: mod_base = cm
  modified_base 122: mod_base = um
  modified_base 123: mod_base = OTHER; note = Phosphorothioate (PS) linkage
  modified_base 123: mod_base = um
  modified_base 124: mod_base = OTHER; note = Phosphorothioate (PS) linkage
  modified_base 124: mod_base = um
  modified_base 125: mod_base = OTHER; note = Phosphorothioate (PS) linkage
  modified_base 125: mod_base = um
  source 1..125: mol_type = other RNA

SEQ ID NO: 113 - RNA, 124 nt, synthetic construct; identical to SEQ ID NO: 30
  modified_base 1: mod_base = um
  modified_base 2: mod_base = OTHER; note = Phosphorothioate (PS) linkage
  modified_base 2: mod_base = um
  modified_base 3: mod_base = OTHER; note = Phosphorothioate (PS) linkage
  modified_base 3: mod_base = gm
  modified_base 4: mod_base = OTHER; note = Phosphorothioate (PS) linkage
  modified_base 29: mod_base = gm
  modified_base 30: mod_base = cm
  modified_base 31: mod_base = um
  modified_base 32: mod_base = OTHER; note = 2'-O-methyladenosine
  modified_base 33: mod_base = gm
  modified_base 34: mod_base = OTHER; note = 2'-O-methyladenosine
  modified_base 35: mod_base = OTHER; note = 2'-O-methyladenosine
  modified_base 36: mod_base = OTHER; note = 2'-O-methyladenosine
  modified_base 37: mod_base = um
  modified_base 38: mod_base = OTHER; note = 2'-O-methyladenosine
  modified_base 39: mod_base = gm
  modified_base 40: mod_base = cm
  modified_base 68: mod_base = OTHER; note = 2'-O-methyladenosine
  modified_base 69: mod_base = OTHER; note = 2'-O-methyladenosine
  modified_base 70: mod_base = cm
  modified_base 71: mod_base = um
  modified_base 72: mod_base = um
  modified_base 73: mod_base = gm
  modified_base 74: mod_base = OTHER; note = 2'-O-methyladenosine
  modified_base 75: mod_base = OTHER; note = 2'-O-methyladenosine
  modified_base 76: mod_base = OTHER; note = 2'-O-methyladenosine
  modified_base 77: mod_base = OTHER; note = 2'-O-methyladenosine
  modified_base 78: mod_base = OTHER; note = 2'-O-methyladenosine
  modified_base 79: mod_base = gm
  modified_base 80: mod_base = um
  modified_base 81: mod_base = gm
  modified_base 82: mod_base = gm
  modified_base 83: mod_base = cm
  modified_base 84: mod_base = OTHER; note = 2'-O-methyladenosine
  modified_base 85: mod_base = cm
  modified_base 86: mod_base = cm
  modified_base 87: mod_base = gm
  modified_base 88: mod_base = OTHER; note = 2'-O-methyladenosine
  modified_base 89: mod_base = gm
  modified_base 90: mod_base = um
  modified_base 91: mod_base = cm
  modified_base 92: mod_base = gm
  modified_base 93: mod_base = gm
  modified_base 94: mod_base = um
  modified_base 95: mod_base = gm
  modified_base 96: mod_base = cm
  modified_base 121: mod_base = um
  modified_base 122: mod_base = OTHER; note = Phosphorothioate (PS) linkage
  modified_base 122: mod_base = um
  modified_base 123: mod_base = OTHER; note = Phosphorothioate (PS) linkage
  modified_base 123: mod_base = um
  modified_base 124: mod_base = OTHER; note = Phosphorothioate (PS) linkage
  modified_base 124: mod_base = um
  source 1..124: mol_type = other RNA

SEQ ID NO: 114 - RNA, 123 nt, synthetic construct; identical to SEQ ID NO: 31
  modified_base 1: mod_base = um
  modified_base 2: mod_base = OTHER; note = Phosphorothioate (PS) linkage
  modified_base 2: mod_base = um
  modified_base 3: mod_base = OTHER; note = Phosphorothioate (PS) linkage
  modified_base 3: mod_base = gm
  modified_base 4: mod_base = OTHER; note = Phosphorothioate (PS) linkage
  modified_base 29: mod_base = gm
  modified_base 30: mod_base = cm
  modified_base 31: mod_base = um
  modified_base 32: mod_base = OTHER; note = 2'-O-methyladenosine
  modified_base 33: mod_base = gm
  modified_base 34: mod_base = OTHER; note = 2'-O-methyladenosine
  modified_base 35: mod_base = OTHER; note = 2'-O-methyladenosine
  modified_base 36: mod_base = OTHER; note = 2'-O-methyladenosine
  modified_base 37: mod_base = um
  modified_base 38: mod_base = OTHER; note = 2'-O-methyladenosine
  modified_base 39: mod_base = gm
  modified_base 40: mod_base = cm
  modified_base 68: mod_base = OTHER; note = 2'-O-methyladenosine
  modified_base 69: mod_base = OTHER; note = 2'-O-methyladenosine
  modified_base 70: mod_base = cm
  modified_base 71: mod_base = um
  modified_base 72: mod_base = um
  modified_base 73: mod_base = gm
  modified_base 74: mod_base = OTHER; note = 2'-O-methyladenosine
  modified_base 75: mod_base = OTHER; note = 2'-O-methyladenosine
  modified_base 76: mod_base = OTHER; note = 2'-O-methyladenosine
  modified_base 77: mod_base = OTHER; note = 2'-O-methyladenosine
  modified_base 78: mod_base = OTHER; note = 2'-O-methyladenosine
  modified_base 79: mod_base = gm
  modified_base 80: mod_base = um
  modified_base 81: mod_base = gm
  modified_base 82: mod_base = gm
  modified_base 83: mod_base = cm
  modified_base 84: mod_base = OTHER; note = 2'-O-methyladenosine
  modified_base 85: mod_base = cm
  modified_base 86: mod_base = cm
  modified_base 87: mod_base = gm
  modified_base 88: mod_base = OTHER; note = 2'-O-methyladenosine
  modified_base 89: mod_base = gm
  modified_base 90: mod_base = um
  modified_base 91: mod_base = cm
  modified_base 92: mod_base = gm
  modified_base 93: mod_base = gm
  modified_base 94: mod_base = um
  modified_base 95: mod_base = gm
  modified_base 96: mod_base = cm
  modified_base 120: mod_base = um
  modified_base 121: mod_base = OTHER; note = Phosphorothioate (PS) linkage
  modified_base 121: mod_base = um
  modified_base 122: mod_base = OTHER; note = Phosphorothioate (PS) linkage
  modified_base 122: mod_base = um
  modified_base 123: mod_base = OTHER; note = Phosphorothioate (PS) linkage
  modified_base 123: mod_base = um
  source 1..123: mol_type = other RNA

SEQ ID NO: 115 - RNA, 127 nt, synthetic construct; identical to SEQ ID NO: 32
  modified_base 1: mod_base = um
  modified_base 2: mod_base = OTHER; note = Phosphorothioate (PS) linkage
  modified_base 2: mod_base = um
  modified_base 3: mod_base = OTHER; note = Phosphorothioate (PS) linkage
  modified_base 3: mod_base = gm
  modified_base 4: mod_base = OTHER; note = Phosphorothioate (PS) linkage
  modified_base 29: mod_base = gm
  modified_base 30: mod_base = cm
  modified_base 31: mod_base = um
  modified_base 32: mod_base = OTHER; note = 2'-O-methyladenosine
  modified_base 33: mod_base = gm
  modified_base 34: mod_base = OTHER; note = 2'-O-methyladenosine
  modified_base 35: mod_base = OTHER; note = 2'-O-methyladenosine
  modified_base 36: mod_base = OTHER; note = 2'-O-methyladenosine
  modified_base 37: mod_base = um
  modified_base 38: mod_base = OTHER; note = 2'-O-methyladenosine
  modified_base 39: mod_base = gm
  modified_base 40: mod_base = cm
  modified_base 68: mod_base = OTHER; note = 2'-O-methyladenosine
  modified_base 69: mod_base = OTHER; note = 2'-O-methyladenosine
  modified_base 70: mod_base = cm
  modified_base 71: mod_base = um
  modified_base 72: mod_base = um
  modified_base 73: mod_base = gm
  modified_base 74: mod_base = OTHER; note = 2'-O-methyladenosine
  modified_base 75: mod_base = OTHER; note = 2'-O-methyladenosine
  modified_base 76: mod_base = OTHER; note = 2'-O-methyladenosine
  modified_base 77: mod_base = OTHER; note = 2'-O-methyladenosine
  modified_base 78: mod_base = OTHER; note = 2'-O-methyladenosine
  modified_base 79: mod_base = gm
  modified_base 80: mod_base = um
  modified_base 81: mod_base = gm
  modified_base 82: mod_base = gm
  modified_base 83: mod_base = cm
  modified_base 84: mod_base = OTHER; note = 2'-O-methyladenosine
  modified_base 85: mod_base = cm
  modified_base 86: mod_base = cm
  modified_base 87: mod_base = gm
  modified_base 88: mod_base = OTHER; note = 2'-O-methyladenosine
  modified_base 89: mod_base = gm
  modified_base 90: mod_base = um
  modified_base 91: mod_base = cm
  modified_base 92: mod_base = gm
  modified_base 93: mod_base = gm
  modified_base 94: mod_base = um
  modified_base 95: mod_base = gm
  modified_base 96: mod_base = cm
  modified_base 124: mod_base = um
  modified_base 125: mod_base = OTHER; note = Phosphorothioate (PS) linkage
  modified_base 125: mod_base = um
  modified_base 126: mod_base = OTHER; note = Phosphorothioate (PS) linkage
  modified_base 126: mod_base = um
  modified_base 127: mod_base = OTHER; note = Phosphorothioate (PS) linkage
  modified_base 127: mod_base = um
  source 1..127: mol_type = other RNA

SEQ ID NO: 116 - RNA, 126 nt, synthetic construct; identical to SEQ ID NO: 33
  modified_base 1: mod_base = um
  modified_base 2: mod_base = OTHER; note = Phosphorothioate (PS) linkage
  modified_base 2: mod_base = um
  modified_base 3: mod_base = OTHER; note = Phosphorothioate (PS) linkage
  modified_base 3: mod_base = gm
  modified_base 4: mod_base = OTHER; note = Phosphorothioate (PS) linkage
  modified_base 29: mod_base = gm
  modified_base 30: mod_base = cm
  modified_base 31: mod_base = um
  modified_base 32: mod_base = OTHER; note = 2'-O-methyladenosine
  modified_base 33: mod_base = gm
  modified_base 34: mod_base = OTHER; note = 2'-O-methyladenosine
  modified_base 35: mod_base = OTHER; note = 2'-O-methyladenosine
  modified_base 36: mod_base = OTHER; note = 2'-O-methyladenosine
  modified_base 37: mod_base = um
  modified_base 38: mod_base = OTHER; note = 2'-O-methyladenosine
  modified_base 39: mod_base = gm
  modified_base 40: mod_base = cm
  modified_base 68: mod_base = OTHER; note = 2'-O-methyladenosine
  modified_base 69: mod_base = OTHER; note = 2'-O-methyladenosine
  modified_base 70: mod_base = cm
  modified_base 71: mod_base = um
  modified_base 72: mod_base = um
  modified_base 73: mod_base = gm
  modified_base 74: mod_base = OTHER; note = 2'-O-methyladenosine
  modified_base 75: mod_base = OTHER; note = 2'-O-methyladenosine
  modified_base 76: mod_base = OTHER; note = 2'-O-methyladenosine
  modified_base 77: mod_base = OTHER; note = 2'-O-methyladenosine
  modified_base 78: mod_base = OTHER; note = 2'-O-methyladenosine
  modified_base 79: mod_base = gm
  modified_base 80: mod_base = um
  modified_base 81: mod_base = gm
  modified_base 82: mod_base = gm
  modified_base 83: mod_base = cm
  modified_base 84: mod_base = OTHER; note = 2'-O-methyladenosine
  modified_base 85: mod_base = cm
  modified_base 86: mod_base = cm
  modified_base 87: mod_base = gm
  modified_base 88: mod_base = OTHER; note = 2'-O-methyladenosine
  modified_base 89: mod_base = gm
  modified_base 90: mod_base = um
  modified_base 91: mod_base = cm
  modified_base 92: mod_base = gm
  modified_base 93: mod_base = gm
  modified_base 94: mod_base = um
  modified_base 95: mod_base = gm
  modified_base 96: mod_base = cm
  modified_base 123: mod_base = um
  modified_base 124: mod_base = OTHER; note = Phosphorothioate (PS) linkage
  modified_base 124: mod_base = um
  modified_base 125: mod_base = OTHER; note = Phosphorothioate (PS) linkage
  modified_base 125: mod_base = um
  modified_base 126: mod_base = OTHER; note = Phosphorothioate (PS) linkage
  modified_base 126: mod_base = um
  source 1..126: mol_type = other RNA

SEQ ID NO: 117 - RNA, 125 nt, synthetic construct; identical to SEQ ID NO: 34
  modified_base 1: mod_base = um
  modified_base 2: mod_base = OTHER; note = Phosphorothioate (PS) linkage
  modified_base 2: mod_base = um
  modified_base 3: mod_base = OTHER; note = Phosphorothioate (PS) linkage
  modified_base 3: mod_base = gm
  modified_base 4: mod_base = OTHER; note = Phosphorothioate (PS) linkage
  modified_base 29: mod_base = gm
  modified_base 30: mod_base = cm
  modified_base 31: mod_base = um
  modified_base 32: mod_base = OTHER; note = 2'-O-methyladenosine
  modified_base 33: mod_base = gm
  modified_base 34: mod_base = OTHER; note = 2'-O-methyladenosine
  modified_base 35: mod_base = OTHER; note = 2'-O-methyladenosine
  modified_base 36: mod_base = OTHER; note = 2'-O-methyladenosine
  modified_base 37: mod_base = um
  modified_base 38: mod_base = OTHER; note = 2'-O-methyladenosine
  modified_base 39: mod_base = gm
  modified_base 40: mod_base = cm
  modified_base 68: mod_base = OTHER; note = 2'-O-methyladenosine
  modified_base 69: mod_base = OTHER; note = 2'-O-methyladenosine
  modified_base 70: mod_base = cm
  modified_base 71: mod_base = um
  modified_base 72: mod_base = um
  modified_base 73: mod_base = gm
  modified_base 74: mod_base = OTHER; note = 2'-O-methyladenosine
  modified_base 75: mod_base = OTHER; note = 2'-O-methyladenosine
  modified_base 76: mod_base = OTHER; note = 2'-O-methyladenosine
  modified_base 77: mod_base = OTHER; note = 2'-O-methyladenosine
  modified_base 78: mod_base = OTHER; note = 2'-O-methyladenosine
  modified_base 79: mod_base = gm
  modified_base 80: mod_base = um
  modified_base 81: mod_base = gm
  modified_base 82: mod_base = gm
  modified_base 83: mod_base = cm
  modified_base 84: mod_base = OTHER; note = 2'-O-methyladenosine
  modified_base 85: mod_base = cm
  modified_base 86: mod_base = cm
  modified_base 87: mod_base = gm
  modified_base 88: mod_base = OTHER; note = 2'-O-methyladenosine
  modified_base 89: mod_base = gm
  modified_base 90: mod_base = um
  modified_base 91: mod_base = cm
  modified_base 92: mod_base = gm
  modified_base 93: mod_base = gm
  modified_base 94: mod_base = um
  modified_base 95: mod_base = gm
  modified_base 96: mod_base = cm
  modified_base 122: mod_base = um
  modified_base 123: mod_base = OTHER; note = Phosphorothioate (PS) linkage
  modified_base 123: mod_base = um
  modified_base 124: mod_base = OTHER; note = Phosphorothioate (PS) linkage
  modified_base 124: mod_base = um
  modified_base 125: mod_base = OTHER; note = Phosphorothioate (PS) linkage
  modified_base 125: mod_base = um
  source 1..125: mol_type = other RNA

SEQ ID NO: 118 - RNA, 124 nt, synthetic construct; identical to SEQ ID NO: 35
  modified_base 1: mod_base = um
  modified_base 2: mod_base = OTHER; note = Phosphorothioate (PS) linkage
  modified_base 2: mod_base = um
  modified_base 3: mod_base = OTHER; note = Phosphorothioate (PS) linkage
  modified_base 3: mod_base = gm
  modified_base 4: mod_base = OTHER; note = Phosphorothioate (PS) linkage
  modified_base 29: mod_base = gm
  modified_base 30: mod_base = cm
  modified_base 31: mod_base = um
  modified_base 32: mod_base = OTHER; note = 2'-O-methyladenosine
  modified_base 33: mod_base = gm
  modified_base 34: mod_base = OTHER; note = 2'-O-methyladenosine
  modified_base 35: mod_base = OTHER; note = 2'-O-methyladenosine
  modified_base 36: mod_base = OTHER; note = 2'-O-methyladenosine
  modified_base 37: mod_base = um
  modified_base 38: mod_base = OTHER; note = 2'-O-methyladenosine
  modified_base 39: mod_base = gm
  modified_base 40: mod_base = cm
  modified_base 68: mod_base = OTHER; note = 2'-O-methyladenosine
  modified_base 69: mod_base = OTHER; note = 2'-O-methyladenosine
  modified_base 70: mod_base = cm
  modified_base 71: mod_base = um
  modified_base 72: mod_base = um
  modified_base 73: mod_base = gm
  modified_base 74: mod_base = OTHER; note = 2'-O-methyladenosine
  modified_base 75: mod_base = OTHER; note = 2'-O-methyladenosine
  modified_base 76: mod_base = OTHER; note = 2'-O-methyladenosine
  modified_base 77: mod_base = OTHER; note = 2'-O-methyladenosine
  modified_base 78: mod_base = OTHER; note = 2'-O-methyladenosine
  modified_base 79: mod_base = gm
  modified_base 80: mod_base = um
  modified_base 81: mod_base = gm
  modified_base 82: mod_base = gm
  modified_base 83: mod_base = cm
  modified_base 84: mod_base = OTHER; note = 2'-O-methyladenosine
  modified_base 85: mod_base = cm
  modified_base 86: mod_base = cm
  modified_base 87: mod_base = gm
  modified_base 88: mod_base = OTHER; note = 2'-O-methyladenosine
  modified_base 89: mod_base = gm
  modified_base 90: mod_base = um
  modified_base 91: mod_base = cm
  modified_base 92: mod_base = gm
  modified_base 93: mod_base = gm
  modified_base 94: mod_base = um
  modified_base 95: mod_base = gm
  modified_base 96: mod_base = cm
  modified_base 121: mod_base = um
  modified_base 122: mod_base = OTHER; note = Phosphorothioate (PS) linkage
  modified_base 122: mod_base = um
  modified_base 123: mod_base = OTHER; note = Phosphorothioate (PS) linkage
  modified_base 123: mod_base = um
  modified_base 124: mod_base = OTHER; note = Phosphorothioate (PS) linkage
  modified_base 124: mod_base = um
  source 1..124: mol_type = other RNA

SEQ ID NO: 119 - RNA, 123 nt, synthetic construct; identical to SEQ ID NO: 36
  modified_base 1: mod_base = um
  modified_base 2: mod_base = OTHER; note = Phosphorothioate (PS) linkage
  modified_base 2: mod_base = um
  modified_base 3: mod_base = OTHER; note = Phosphorothioate (PS) linkage
  modified_base 3: mod_base = gm
  modified_base 4: mod_base = OTHER; note = Phosphorothioate (PS) linkage
  modified_base 29: mod_base = gm
  modified_base 30: mod_base = cm
  modified_base 31: mod_base = um
  modified_base 32: mod_base = OTHER; note = 2'-O-methyladenosine
  modified_base 33: mod_base = gm
  modified_base 34: mod_base = OTHER; note = 2'-O-methyladenosine
  modified_base 35: mod_base = OTHER; note = 2'-O-methyladenosine
  modified_base 36: mod_base = OTHER; note = 2'-O-methyladenosine
  modified_base 37: mod_base = um
  modified_base 38: mod_base = OTHER; note = 2'-O-methyladenosine
  modified_base 39: mod_base = gm
  modified_base 40: mod_base = cm
  modified_base 68: mod_base = OTHER; note = 2'-O-methyladenosine
  modified_base 69: mod_base = OTHER; note = 2'-O-methyladenosine
  modified_base 70: mod_base = cm
  modified_base 71: mod_base = um
  modified_base 72: mod_base = um
  modified_base 73: mod_base = gm
  modified_base 74: mod_base = OTHER; note = 2'-O-methyladenosine
  modified_base 75: mod_base = OTHER; note = 2'-O-methyladenosine
  modified_base 76: mod_base = OTHER; note = 2'-O-methyladenosine
  modified_base 77: mod_base = OTHER; note = 2'-O-methyladenosine
  modified_base 78: mod_base = OTHER; note = 2'-O-methyladenosine
  modified_base 79: mod_base = gm
  modified_base 80: mod_base = um
  modified_base 81: mod_base = gm
  modified_base 82: mod_base = gm
  modified_base 83: mod_base = cm
  modified_base 84: mod_base = OTHER; note = 2'-O-methyladenosine
  modified_base 85: mod_base = cm
  modified_base 86: mod_base = cm
  modified_base 87: mod_base = gm
  modified_base 88: mod_base = OTHER; note = 2'-O-methyladenosine
  modified_base 89: mod_base = gm
  modified_base 90: mod_base = um
  modified_base 91: mod_base = cm
  modified_base 92: mod_base = gm
  modified_base 93: mod_base = gm
  modified_base 94: mod_base = um
  modified_base 95: mod_base = gm
  modified_base 96: mod_base = cm
  modified_base 120: mod_base = um
  modified_base 121: mod_base = OTHER; note = Phosphorothioate (PS) linkage
  modified_base 121: mod_base = um
  modified_base 122: mod_base = OTHER; note = Phosphorothioate (PS) linkage
  modified_base 122: mod_base = um
  modified_base 123: mod_base = OTHER; note = Phosphorothioate (PS) linkage
  modified_base 123: mod_base = um
  source 1..123: mol_type = other RNA

SEQ ID NO: 120 - RNA, 122 nt, synthetic construct; identical to SEQ ID NO: 37
  modified_base 1: mod_base = um
  modified_base 2: mod_base = OTHER; note = Phosphorothioate (PS) linkage
  modified_base 2: mod_base = um
  modified_base 3: mod_base = OTHER; note = Phosphorothioate (PS) linkage
  modified_base 3: mod_base = gm
  modified_base 4: mod_base = OTHER; note = Phosphorothioate (PS) linkage
  modified_base 29: mod_base = gm
  modified_base 30: mod_base = cm
  modified_base 31: mod_base = um
  modified_base 32: mod_base = OTHER; note = 2'-O-methyladenosine
  modified_base 33: mod_base = gm
  modified_base 34: mod_base = OTHER; note = 2'-O-methyladenosine
  modified_base 35: mod_base = OTHER; note = 2'-O-methyladenosine
  modified_base 36: mod_base = OTHER; note = 2'-O-methyladenosine
  modified_base 37: mod_base = um
  modified_base 38: mod_base = OTHER; note = 2'-O-methyladenosine
  modified_base 39: mod_base = gm
  modified_base 40: mod_base = cm
  modified_base 68: mod_base = OTHER; note = 2'-O-methyladenosine
  modified_base 69: mod_base = OTHER; note = 2'-O-methyladenosine
  modified_base 70: mod_base = cm
  modified_base 71: mod_base = um
  modified_base 72: mod_base = um
  modified_base 73: mod_base = gm
  modified_base 74: mod_base = OTHER; note = 2'-O-methyladenosine
  modified_base 75: mod_base = OTHER; note = 2'-O-methyladenosine
  modified_base 76: mod_base = OTHER; note = 2'-O-methyladenosine
  modified_base 77: mod_base = OTHER; note = 2'-O-methyladenosine
  modified_base 78: mod_base = OTHER; note = 2'-O-methyladenosine
  modified_base 79: mod_base = gm
  modified_base 80: mod_base = um
  modified_base 81: mod_base = gm
  modified_base 82: mod_base = gm
  modified_base 83: mod_base = cm
  modified_base 84: mod_base = OTHER; note = 2'-O-methyladenosine
  modified_base 85: mod_base = cm
  modified_base 86: mod_base = cm
  modified_base 87: mod_base = gm
  modified_base 88: mod_base = OTHER; note = 2'-O-methyladenosine
  modified_base 89: mod_base = gm
  modified_base 90: mod_base = um
  modified_base 91: mod_base = cm
  modified_base 92: mod_base = gm
  modified_base 93: mod_base = gm
  modified_base 94: mod_base = um
  modified_base 95: mod_base = gm
  modified_base 96: mod_base = cm
  modified_base 119: mod_base = um
  modified_base 120: mod_base = OTHER; note = Phosphorothioate (PS) linkage
  modified_base 120: mod_base = um
  modified_base 121: mod_base = OTHER; note = Phosphorothioate (PS) linkage
  modified_base 121: mod_base = um
  modified_base 122: mod_base = OTHER; note = Phosphorothioate (PS) linkage
  modified_base 122: mod_base = um
  source 1..122: mol_type = other RNA

SEQ ID NO: 121 - RNA, 121 nt, synthetic construct; identical to SEQ ID NO: 38
  modified_base 1: mod_base = um
  modified_base 2: mod_base = OTHER; note = Phosphorothioate (PS) linkage
  modified_base 2: mod_base = um
  modified_base 3: mod_base = OTHER; note = Phosphorothioate (PS) linkage
  modified_base 3: mod_base = gm
  modified_base 4: mod_base = OTHER; note = Phosphorothioate (PS) linkage
  modified_base 29: mod_base = gm
  modified_base 30: mod_base = cm
  modified_base 31: mod_base = um
  modified_base 32: mod_base = OTHER; note = 2'-O-methyladenosine
  modified_base 33: mod_base = gm
  modified_base 34: mod_base = OTHER; note = 2'-O-methyladenosine
  modified_base 35: mod_base = OTHER; note = 2'-O-methyladenosine
  modified_base 36: mod_base = OTHER; note = 2'-O-methyladenosine
  modified_base 37: mod_base = um
  modified_base 38: mod_base = OTHER; note = 2'-O-methyladenosine
  modified_base 39: mod_base = gm
  modified_base 40: mod_base = cm
  modified_base 68: mod_base = OTHER; note = 2'-O-methyladenosine
  modified_base 69: mod_base = OTHER; note = 2'-O-methyladenosine
  modified_base 70: mod_base = cm
  modified_base 71: mod_base = um
  modified_base 72: mod_base = um
  modified_base 73: mod_base = gm
  modified_base 74: mod_base = OTHER; note = 2'-O-methyladenosine
  modified_base 75: mod_base = OTHER; note = 2'-O-methyladenosine
  modified_base 76: mod_base = OTHER; note = 2'-O-methyladenosine
  modified_base 77: mod_base = OTHER; note = 2'-O-methyladenosine
  modified_base 78: mod_base = OTHER; note = 2'-O-methyladenosine
  modified_base 79: mod_base = gm
  modified_base 80: mod_base = um
  modified_base 81: mod_base = gm
  modified_base 82: mod_base = gm
  modified_base 83: mod_base = cm
  modified_base 84: mod_base = OTHER; note = 2'-O-methyladenosine
  modified_base 85: mod_base = cm
  modified_base 86: mod_base = cm
  modified_base 87: mod_base = gm
  modified_base 88: mod_base = OTHER; note = 2'-O-methyladenosine
  modified_base 89: mod_base = gm
  modified_base 90: mod_base = um
  modified_base 91: mod_base = cm
  modified_base 92: mod_base = gm
  modified_base 93: mod_base = gm
  modified_base 94: mod_base = um
  modified_base 95: mod_base = gm
  modified_base 96: mod_base = cm
  modified_base 118: mod_base = um
  modified_base 119: mod_base = OTHER; note = Phosphorothioate (PS) linkage
  modified_base 119: mod_base = um
  modified_base 120: mod_base = OTHER; note = Phosphorothioate (PS) linkage
  modified_base 120: mod_base = um
  modified_base 121: mod_base = OTHER; note = Phosphorothioate (PS) linkage
  modified_base 121: mod_base = um
  source 1..121: mol_type = other RNA

SEQ ID NO: 122 - RNA, 120 nt, synthetic construct; identical to SEQ ID NO: 39
  modified_base 1: mod_base = um
  modified_base 2: mod_base = OTHER; note = Phosphorothioate (PS) linkage
  modified_base 2: mod_base = um
  modified_base 3: mod_base = OTHER; note = Phosphorothioate (PS) linkage
  modified_base 3: mod_base = gm
  modified_base 4: mod_base = OTHER; note = Phosphorothioate (PS) linkage
  modified_base 29: mod_base = gm
  modified_base 30: mod_base = cm
  modified_base 31: mod_base = um
  modified_base 32: mod_base = OTHER; note = 2'-O-methyladenosine
  modified_base 33: mod_base = gm
  modified_base 34: mod_base = OTHER; note = 2'-O-methyladenosine
  modified_base 35: mod_base = OTHER; note = 2'-O-methyladenosine
  modified_base 36: mod_base = OTHER; note = 2'-O-methyladenosine
  modified_base 37: mod_base = um
  modified_base 38: mod_base = OTHER; note = 2'-O-methyladenosine
  modified_base 39: mod_base = gm
  modified_base 40: mod_base = cm
  modified_base 68: mod_base = OTHER; note = 2'-O-methyladenosine
  modified_base 69: mod_base = OTHER; note = 2'-O-methyladenosine
  modified_base 70: mod_base = cm
  modified_base 71: mod_base = um
  modified_base 72: mod_base = um
  modified_base 73: mod_base = gm
  modified_base 74: mod_base = OTHER; note = 2'-O-methyladenosine
  modified_base 75: mod_base = OTHER; note = 2'-O-methyladenosine
  modified_base 76: mod_base = OTHER; note = 2'-O-methyladenosine
  modified_base 77: mod_base = OTHER; note = 2'-O-methyladenosine
  modified_base 78: mod_base = OTHER; note = 2'-O-methyladenosine
  modified_base 79: mod_base = gm
  modified_base 80: mod_base = um
  modified_base 81: mod_base = gm
  modified_base 82: mod_base = gm
  modified_base 83: mod_base = cm
  modified_base 84: mod_base = OTHER; note = 2'-O-methyladenosine
  modified_base 85: mod_base = cm
  modified_base 86: mod_base = cm
  modified_base 87: mod_base = gm
  modified_base 88: mod_base = OTHER; note = 2'-O-methyladenosine
  modified_base 89: mod_base = gm
  modified_base 90: mod_base = um
  modified_base 91: mod_base = cm
  modified_base 92: mod_base = gm
  modified_base 93: mod_base = gm
  modified_base 94: mod_base = um
  modified_base 95: mod_base = gm
  modified_base 96: mod_base = cm
  modified_base 117: mod_base = um
  modified_base 118: mod_base = OTHER; note = Phosphorothioate (PS) linkage
  modified_base 118: mod_base = um
  modified_base 119: mod_base = OTHER; note = Phosphorothioate (PS) linkage
  modified_base 119: mod_base = um
  modified_base 120: mod_base = OTHER; note = Phosphorothioate (PS) linkage
  modified_base 120: mod_base = um
  source 1..120: mol_type = other RNA

SEQ ID NO: 123 - RNA, 125 nt, synthetic construct; identical to SEQ ID NO: 40
  modified_base 1: mod_base = um
  modified_base 2: mod_base = OTHER; note = Phosphorothioate (PS) linkage
  modified_base 2: mod_base = um
  modified_base 3: mod_base = OTHER; note = Phosphorothioate (PS) linkage
  modified_base 3: mod_base = gm
  modified_base 4: mod_base = OTHER; note = Phosphorothioate (PS) linkage
  modified_base 29: mod_base = gm
  modified_base 30: mod_base = cm
  modified_base 31: mod_base = um
  modified_base 32: mod_base = OTHER; note = 2'-O-methyladenosine
  modified_base 33: mod_base = gm
  modified_base 34: mod_base = OTHER; note = 2'-O-methyladenosine
  modified_base 35: mod_base = OTHER; note = 2'-O-methyladenosine
  modified_base 36: mod_base = OTHER; note = 2'-O-methyladenosine
  modified_base 37: mod_base = um
  modified_base 38: mod_base = OTHER; note = 2'-O-methyladenosine
  modified_base 39: mod_base = gm
  modified_base 40: mod_base = cm
  modified_base 68: mod_base = OTHER; note = 2'-O-methyladenosine
  modified_base 69: mod_base = OTHER; note = 2'-O-methyladenosine
  modified_base 70: mod_base = cm
  modified_base 71: mod_base = um
  modified_base 72: mod_base = um
  modified_base 73: mod_base = gm
  modified_base 74: mod_base = OTHER; note = 2'-O-methyladenosine
  modified_base 75: mod_base = OTHER; note = 2'-O-methyladenosine
  modified_base 76: mod_base = OTHER; note = 2'-O-methyladenosine
  modified_base 77: mod_base = OTHER; note = 2'-O-methyladenosine
  modified_base 78: mod_base = OTHER; note = 2'-O-methyladenosine
  modified_base 79: mod_base = gm
  modified_base 80: mod_base = um
  modified_base 81: mod_base = gm
  modified_base 82: mod_base = gm
  modified_base 83: mod_base = cm
  modified_base 84: mod_base = OTHER; note = 2'-O-methyladenosine
  modified_base 85: mod_base = cm
  modified_base 86: mod_base = cm
  modified_base 87: mod_base = gm
  modified_base 88: mod_base = OTHER; note = 2'-O-methyladenosine
  modified_base 89: mod_base = gm
  modified_base 90: mod_base = um
  modified_base 91: mod_base = cm
  modified_base 92: mod_base = gm
  modified_base 93: mod_base = gm
  modified_base 94: mod_base = um
  modified_base 95: mod_base = gm
  modified_base 96: mod_base = cm
  modified_base 122: mod_base = um
  modified_base 123: mod_base = OTHER; note = Phosphorothioate (PS) linkage
  modified_base 123: mod_base = um
  modified_base 124: mod_base = OTHER; note = Phosphorothioate (PS) linkage
  modified_base 124: mod_base = um
  modified_base 125: mod_base = OTHER; note = Phosphorothioate (PS) linkage
  modified_base 125: mod_base = um
  source 1..125: mol_type = other RNA

SEQ ID NO: 124 - RNA, 124 nt, synthetic construct; identical to SEQ ID NO: 41
  modified_base 1: mod_base = um
  modified_base 2: mod_base = OTHER; note = Phosphorothioate (PS) linkage
  modified_base 2: mod_base = um
  modified_base 3: mod_base = OTHER; note = Phosphorothioate (PS) linkage
  modified_base 3: mod_base = gm
  modified_base 4: mod_base = OTHER; note = Phosphorothioate (PS) linkage
  modified_base 29: mod_base = gm
  modified_base 30: mod_base = cm
  modified_base 31: mod_base = um
  modified_base 32: mod_base = OTHER; note = 2'-O-methyladenosine
  modified_base 33: mod_base = gm
  modified_base 34: mod_base = OTHER; note = 2'-O-methyladenosine
  modified_base 35: mod_base = OTHER; note = 2'-O-methyladenosine
  modified_base 36: mod_base = OTHER; note = 2'-O-methyladenosine
  modified_base 37: mod_base = um
  modified_base 38: mod_base = OTHER; note = 2'-O-methyladenosine
  modified_base 39: mod_base = gm
  modified_base 40: mod_base = cm
  modified_base 68: mod_base = OTHER; note = 2'-O-methyladenosine
  modified_base 69: mod_base = OTHER; note = 2'-O-methyladenosine
  modified_base 70: mod_base = cm
  modified_base 71: mod_base = um
  modified_base 72: mod_base = um
  modified_base 73: mod_base = gm
  modified_base 74: mod_base = OTHER; note = 2'-O-methyladenosine
  modified_base 75: mod_base = OTHER; note = 2'-O-methyladenosine
  modified_base 76: mod_base = OTHER; note = 2'-O-methyladenosine
  modified_base 77: mod_base = OTHER; note = 2'-O-methyladenosine
  modified_base 78: mod_base = OTHER; note = 2'-O-methyladenosine
  modified_base 79: mod_base = gm
  modified_base 80: mod_base = um
  modified_base 81: mod_base = gm
  modified_base 82: mod_base = gm
  modified_base 83: mod_base = cm
  modified_base 84: mod_base = OTHER; note = 2'-O-methyladenosine
  modified_base 85: mod_base = cm
  modified_base 86: mod_base = cm
  modified_base 87: mod_base = gm
  modified_base 88: mod_base = OTHER; note = 2'-O-methyladenosine
  modified_base 89: mod_base = gm
  modified_base 90: mod_base = um
  modified_base 91: mod_base = cm
  modified_base 92: mod_base = gm
  modified_base 93: mod_base = gm
  modified_base 94: mod_base = um
  modified_base 95: mod_base = gm
  modified_base 96: mod_base = cm
  modified_base 121: mod_base = um
  modified_base 122: mod_base = OTHER; note = Phosphorothioate (PS) linkage
  modified_base 122: mod_base = um
  modified_base 123: mod_base = OTHER; note = Phosphorothioate (PS) linkage
  modified_base 123: mod_base = um
  modified_base 124: mod_base = OTHER; note = Phosphorothioate (PS) linkage
  modified_base 124: mod_base = um
  source 1..124: mol_type = other RNA

SEQ ID NO: 125 - RNA, 123 nt, synthetic construct; identical to SEQ ID NO: 42
  modified_base 1: mod_base = um
  modified_base 2: mod_base = OTHER; note = Phosphorothioate (PS) linkage
  modified_base 2: mod_base = um
  modified_base 3: mod_base = OTHER; note = Phosphorothioate (PS) linkage
  modified_base 3: mod_base = gm
  modified_base 4: mod_base = OTHER; note = Phosphorothioate (PS) linkage
  modified_base 29: mod_base = gm
  modified_base 30: mod_base = cm
  modified_base 31: mod_base = um
  modified_base 32: mod_base = OTHER; note = 2'-O-methyladenosine
  modified_base 33: mod_base = gm
  modified_base 34: mod_base = OTHER; note = 2'-O-methyladenosine
  modified_base 35: mod_base = OTHER; note = 2'-O-methyladenosine
  modified_base 36: mod_base = OTHER; note = 2'-O-methyladenosine
  modified_base 37: mod_base = um
  modified_base 38: mod_base = OTHER; note = 2'-O-methyladenosine
  modified_base 39: mod_base = gm
  modified_base 40: mod_base = cm
  modified_base 68: mod_base = OTHER; note = 2'-O-methyladenosine
  modified_base 69: mod_base = OTHER; note = 2'-O-methyladenosine
  modified_base 70: mod_base = cm
  modified_base 71: mod_base = um
  modified_base 72: mod_base = um
  modified_base 73: mod_base = gm
  modified_base 74: mod_base = OTHER; note = 2'-O-methyladenosine
  modified_base 75: mod_base = OTHER; note = 2'-O-methyladenosine
  modified_base 76: mod_base = OTHER; note = 2'-O-methyladenosine
  modified_base 77: mod_base = OTHER; note = 2'-O-methyladenosine
  modified_base 78: mod_base = OTHER; note = 2'-O-methyladenosine
  modified_base 79: mod_base = gm
  modified_base 80: mod_base = um
  modified_base 81: mod_base = gm
  modified_base 82: mod_base = gm
  modified_base 83: mod_base = cm
  modified_base 84: mod_base = OTHER; note = 2'-O-methyladenosine
  modified_base 85: mod_base = cm
  modified_base 86: mod_base = cm
  modified_base 87: mod_base = gm
  modified_base 88: mod_base = OTHER; note = 2'-O-methyladenosine
  modified_base 89: mod_base = gm
  modified_base 90: mod_base = um
  modified_base 91: mod_base = cm
  modified_base 92: mod_base = gm
  modified_base 93: mod_base = gm
  modified_base 94: mod_base = um
  modified_base 95: mod_base = gm
  modified_base 96: mod_base = cm
  modified_base 120: mod_base = um
  modified_base 121: mod_base = OTHER; note = Phosphorothioate (PS) linkage
  modified_base 121: mod_base = um
  modified_base 122: mod_base = OTHER; note = Phosphorothioate (PS) linkage
  modified_base 122: mod_base = um
  modified_base 123: mod_base = OTHER; note = Phosphorothioate (PS) linkage
  modified_base 123: mod_base = um
  source 1..123: mol_type = other RNA

SEQ ID NO: 126 - RNA, 122 nt, synthetic construct; identical to SEQ ID NO: 43
  modified_base 1: mod_base = um
  modified_base 2: mod_base = OTHER; note = Phosphorothioate (PS) linkage
  modified_base 2: mod_base = um
  modified_base 3: mod_base = OTHER; note = Phosphorothioate (PS) linkage
  modified_base 3: mod_base = gm
  modified_base 4: mod_base = OTHER; note = Phosphorothioate (PS) linkage
  modified_base 29: mod_base = gm
  modified_base 30: mod_base = cm
  modified_base 31: mod_base = um
  modified_base 32: mod_base = OTHER; note = 2'-O-methyladenosine
  modified_base 33: mod_base = gm
  modified_base 34: mod_base = OTHER; note = 2'-O-methyladenosine
  modified_base 35: mod_base = OTHER; note = 2'-O-methyladenosine
  modified_base 36: mod_base = OTHER; note = 2'-O-methyladenosine
  modified_base 37: mod_base = um
  modified_base 38: mod_base = OTHER; note = 2'-O-methyladenosine
  modified_base 39: mod_base = gm
  modified_base 40: mod_base = cm
  modified_base 68: mod_base = OTHER; note = 2'-O-methyladenosine
  modified_base 69: mod_base = OTHER; note = 2'-O-methyladenosine
  modified_base 70: mod_base = cm
  modified_base 71: mod_base = um
  modified_base 72: mod_base = um
  modified_base 73: mod_base = gm
  modified_base 74: mod_base = OTHER; note = 2'-O-methyladenosine
  modified_base 75: mod_base = OTHER; note = 2'-O-methyladenosine
  modified_base 76: mod_base = OTHER; note = 2'-O-methyladenosine
  modified_base 77: mod_base = OTHER; note = 2'-O-methyladenosine
  modified_base 78: mod_base = OTHER; note = 2'-O-methyladenosine
  modified_base 79: mod_base = gm
  modified_base 80: mod_base = um
  modified_base 81: mod_base = gm
  modified_base 82: mod_base = gm
  modified_base 83: mod_base = cm
  modified_base 84: mod_base = OTHER; note = 2'-O-methyladenosine
  modified_base 85: mod_base = cm
  modified_base 86: mod_base = cm
  modified_base 87: mod_base = gm
  modified_base 88: mod_base = OTHER; note = 2'-O-methyladenosine
  modified_base 89: mod_base = gm
  modified_base 90: mod_base = um
  modified_base 91: mod_base = cm
  modified_base 92: mod_base = gm
  modified_base 93: mod_base = gm
  modified_base 94: mod_base = um
  modified_base 95: mod_base = gm
  modified_base 96: mod_base = cm
  modified_base 119: mod_base = um
  modified_base 120: mod_base = OTHER; note = Phosphorothioate (PS) linkage
  modified_base 120: mod_base = um
  modified_base 121: mod_base = OTHER; note = Phosphorothioate (PS) linkage
  modified_base 121: mod_base = um
  modified_base 122: mod_base = OTHER; note = Phosphorothioate (PS) linkage
  modified_base 122: mod_base = um
  source 1..122: mol_type = other RNA

SEQ ID NO: 127 - RNA, 121 nt, synthetic construct; identical to SEQ ID NO: 44
  modified_base 1: mod_base = um
  modified_base 2: mod_base = OTHER; note = Phosphorothioate (PS) linkage
  modified_base 2: mod_base = um
  modified_base 3: mod_base = OTHER; note = Phosphorothioate (PS) linkage
  modified_base 3: mod_base = gm
  modified_base 4: mod_base = OTHER; note = Phosphorothioate (PS) linkage
  modified_base 29: mod_base = gm
  modified_base 30: mod_base = cm
  modified_base 31: mod_base = um
  modified_base 32: mod_base = OTHER; note = 2'-O-methyladenosine
  modified_base 33: mod_base = gm
  modified_base 34: mod_base = OTHER; note = 2'-O-methyladenosine
  modified_base 35: mod_base = OTHER; note = 2'-O-methyladenosine
  modified_base 36: mod_base = OTHER; note = 2'-O-methyladenosine
  modified_base 37: mod_base = um
  modified_base 38: mod_base = OTHER; note = 2'-O-methyladenosine
  modified_base 39: mod_base = gm
  modified_base 40: mod_base = cm
  modified_base 68: mod_base = OTHER; note = 2'-O-methyladenosine
  modified_base 69: mod_base = OTHER; note = 2'-O-methyladenosine
  modified_base 70: mod_base = cm
  modified_base 71: mod_base = um
  modified_base 72: mod_base = um
  modified_base 73: mod_base = gm
  modified_base 74: mod_base = OTHER; note = 2'-O-methyladenosine
  modified_base 75: mod_base = OTHER; note = 2'-O-methyladenosine
  modified_base 76: mod_base = OTHER; note = 2'-O-methyladenosine
  modified_base 77: mod_base = OTHER; note = 2'-O-methyladenosine
  modified_base 78: mod_base = OTHER; note = 2'-O-methyladenosine
  modified_base 79: mod_base = gm
  modified_base 80: mod_base = um
  modified_base 81: mod_base = gm
  modified_base 82: mod_base = gm
  modified_base 83: mod_base = cm
  modified_base 84: mod_base = OTHER; note = 2'-O-methyladenosine
  modified_base 85: mod_base = cm
  modified_base 86: mod_base = cm
  modified_base 87: mod_base = gm
  modified_base 88: mod_base = OTHER; note = 2'-O-methyladenosine
  modified_base 89: mod_base = gm
  modified_base 90: mod_base = um
  modified_base 91: mod_base = cm
  modified_base 92: mod_base = gm
  modified_base 93: mod_base = gm
  modified_base 94: mod_base = um
  modified_base 95: mod_base = gm
  modified_base 96: mod_base = cm
  modified_base 118: mod_base = um
  modified_base 119: mod_base = OTHER; note = Phosphorothioate (PS) linkage
  modified_base 119: mod_base = um
  modified_base 120: mod_base = OTHER; note = Phosphorothioate (PS) linkage
  modified_base 120: mod_base = um
  modified_base 121: mod_base = OTHER; note = Phosphorothioate (PS) linkage
  modified_base 121: mod_base = um
  source 1..121: mol_type = other RNA

SEQ ID NO: 128 - RNA, 120 nt, synthetic construct; identical to SEQ ID NO: 45
  modified_base 1: mod_base = um
  modified_base 2: mod_base = OTHER; note = Phosphorothioate (PS) linkage
  modified_base 2: mod_base = um
  modified_base 3: mod_base = OTHER; note = Phosphorothioate (PS) linkage
  modified_base 3: mod_base = gm
  modified_base 4: mod_base = OTHER; note = Phosphorothioate (PS) linkage
  modified_base 29: mod_base = gm
  modified_base 30: mod_base = cm
  modified_base 31: mod_base = um
  modified_base 32: mod_base = OTHER; note = 2'-O-methyladenosine
  modified_base 33: mod_base = gm
  modified_base 34: mod_base = OTHER; note = 2'-O-methyladenosine
  modified_base 35: mod_base = OTHER; note = 2'-O-methyladenosine
  modified_base 36: mod_base = OTHER; note = 2'-O-methyladenosine
  modified_base 37: mod_base = um
  modified_base 38: mod_base = OTHER; note = 2'-O-methyladenosine
  modified_base 39: mod_base = gm
  modified_base 40: mod_base = cm
  modified_base 68: mod_base = OTHER; note = 2'-O-methyladenosine
  modified_base 69: mod_base = OTHER; note = 2'-O-methyladenosine
  modified_base 70: mod_base = cm
  modified_base 71: mod_base = um
  modified_base 72: mod_base = um
  modified_base 73: mod_base = gm
  modified_base 74: mod_base = OTHER; note = 2'-O-methyladenosine
  modified_base 75: mod_base = OTHER; note = 2'-O-methyladenosine
  modified_base 76: mod_base = OTHER; note = 2'-O-methyladenosine
  modified_base 77: mod_base = OTHER; note = 2'-O-methyladenosine
  modified_base 78: mod_base = OTHER; note = 2'-O-methyladenosine
  modified_base 79: mod_base = gm
  modified_base 80: mod_base = um
  modified_base 81: mod_base = gm
  modified_base 82: mod_base = gm
  modified_base 83: mod_base = cm
  modified_base 84: mod_base = OTHER; note = 2'-O-methyladenosine
  modified_base 85: mod_base = cm
  modified_base 86: mod_base = cm
  modified_base 87: mod_base = gm
  modified_base 88: mod_base = OTHER; note = 2'-O-methyladenosine
  modified_base 89: mod_base = gm
  modified_base 90: mod_base = um
  modified_base 91: mod_base = cm
  modified_base 92: mod_base = gm
  modified_base 93: mod_base = gm
  modified_base 94: mod_base = um
  modified_base 95: mod_base = gm
  modified_base 96: mod_base = cm
  modified_base 117: mod_base = um
  modified_base 118: mod_base = OTHER; note = Phosphorothioate (PS) linkage
  modified_base 118: mod_base = um
  modified_base 119: mod_base = OTHER; note = Phosphorothioate (PS) linkage
  modified_base 119: mod_base = um
  modified_base 120: mod_base = OTHER; note = Phosphorothioate (PS) linkage
  modified_base 120: mod_base = um
  source 1..120: mol_type = other RNA

SEQ ID NO: 129 - RNA, 119 nt, synthetic construct; identical to SEQ ID NO: 46
  modified_base 1: mod_base = um
  modified_base 2: mod_base = OTHER; note = Phosphorothioate (PS) linkage
  modified_base 2: mod_base = um
  modified_base 3: mod_base = OTHER; note = Phosphorothioate (PS) linkage
  modified_base 3: mod_base = gm
  modified_base 4: mod_base = OTHER; note = Phosphorothioate (PS) linkage
  modified_base 29: mod_base = gm
  modified_base 30: mod_base = cm
  modified_base 31: mod_base = um
  modified_base 32: mod_base = OTHER; note = 2'-O-methyladenosine
  modified_base 33: mod_base = gm
  modified_base 34: mod_base = OTHER; note = 2'-O-methyladenosine
  modified_base 35: mod_base = OTHER; note = 2'-O-methyladenosine
  modified_base 36: mod_base = OTHER; note = 2'-O-methyladenosine
  modified_base 37: mod_base = um
  modified_base 38: mod_base = OTHER; note = 2'-O-methyladenosine
  modified_base 39: mod_base = gm
  modified_base 40: mod_base = cm
  modified_base 68: mod_base = OTHER; note = 2'-O-methyladenosine
  modified_base 69: mod_base = OTHER; note = 2'-O-methyladenosine
  modified_base 70: mod_base = cm
  modified_base 71: mod_base = um
  modified_base 72: mod_base = um
  modified_base 73: mod_base = gm
  modified_base 74: mod_base = OTHER; note = 2'-O-methyladenosine
  modified_base 75: mod_base = OTHER; note = 2'-O-methyladenosine
  modified_base 76: mod_base = OTHER; note = 2'-O-methyladenosine
  modified_base 77: mod_base = OTHER; note = 2'-O-methyladenosine
  modified_base 78: mod_base = OTHER; note = 2'-O-methyladenosine
  modified_base 79: mod_base = gm
  modified_base 80: mod_base = um
  modified_base 81: mod_base = gm
  modified_base 82: mod_base = gm
  modified_base 83: mod_base = cm
  modified_base 84: mod_base = OTHER; note = 2'-O-methyladenosine
  modified_base 85: mod_base = cm
  modified_base 86: mod_base = cm
  modified_base 87: mod_base = gm
  modified_base 88: mod_base = OTHER; note = 2'-O-methyladenosine
  modified_base 89: mod_base = gm
  modified_base 90: mod_base = um
  modified_base 91: mod_base = cm
  modified_base 92: mod_base = gm
  modified_base 93: mod_base = gm
  modified_base 94: mod_base = um
  modified_base 95: mod_base = gm
  modified_base 96: mod_base = cm
  modified_base 116: mod_base = um
  modified_base 117: mod_base = OTHER; note = Phosphorothioate (PS) linkage
  modified_base 117: mod_base = um
  modified_base 118: mod_base = OTHER; note = Phosphorothioate (PS) linkage
  modified_base 118: mod_base = um
  modified_base 119: mod_base = OTHER; note = Phosphorothioate (PS) linkage
  modified_base 119: mod_base = um
  source 1..119: mol_type = other RNA

SEQ ID NO: 130 - RNA, 118 nt, synthetic construct; identical to SEQ ID NO: 47
  modified_base 1: mod_base = um
  modified_base 2: mod_base = OTHER; note = Phosphorothioate (PS) linkage
  modified_base 2: mod_base = um
  modified_base 3: mod_base = OTHER; note = Phosphorothioate (PS) linkage
  modified_base 3: mod_base = gm
  modified_base 4: mod_base = OTHER; note = Phosphorothioate (PS) linkage
  modified_base 29: mod_base = gm
  modified_base 30: mod_base = cm
  modified_base 31: mod_base = um
  modified_base 32: mod_base = OTHER; note = 2'-O-methyladenosine
  modified_base 33: mod_base = gm
  modified_base 34: mod_base = OTHER; note = 2'-O-methyladenosine
  modified_base 35: mod_base = OTHER; note = 2'-O-methyladenosine
  modified_base 36: mod_base = OTHER; note = 2'-O-methyladenosine
  modified_base 37: mod_base = um
  modified_base 38: mod_base = OTHER; note = 2'-O-methyladenosine
  modified_base 39: mod_base = gm
  modified_base 40: mod_base = cm
  modified_base 68: mod_base = OTHER; note = 2'-O-methyladenosine
  modified_base 69: mod_base = OTHER; note = 2'-O-methyladenosine
  modified_base 70: mod_base = cm
  modified_base 71: mod_base = um
  modified_base 72: mod_base = um
  modified_base 73: mod_base = gm
  modified_base 74: mod_base = OTHER; note = 2'-O-methyladenosine
  modified_base 75: mod_base = OTHER; note = 2'-O-methyladenosine
  modified_base 76: mod_base = OTHER; note = 2'-O-methyladenosine
  modified_base 77: mod_base = OTHER; note = 2'-O-methyladenosine
  modified_base 78: mod_base = OTHER; note = 2'-O-methyladenosine
  modified_base 79: mod_base = gm
  modified_base 80: mod_base = um
  modified_base 81: mod_base = gm
  modified_base 82: mod_base = gm
  modified_base 83: mod_base = cm
  modified_base 84: mod_base = OTHER; note = 2'-O-methyladenosine
  modified_base 85: mod_base = cm
  modified_base 86: mod_base = cm
  modified_base 87: mod_base = gm
  modified_base 88: mod_base = OTHER; note = 2'-O-methyladenosine
  modified_base 89: mod_base = gm
  modified_base 90: mod_base = um
  modified_base 91: mod_base = cm
  modified_base 92: mod_base = gm
  modified_base 93: mod_base = gm
  modified_base 94: mod_base = um
  modified_base 95: mod_base = gm
  modified_base 96: mod_base = cm
  modified_base 115: mod_base = um
  modified_base 116: mod_base = OTHER; note = Phosphorothioate (PS) linkage
  modified_base 116: mod_base = um
  modified_base 117: mod_base = OTHER; note = Phosphorothioate (PS) linkage
  modified_base 117: mod_base = um
  modified_base 118: mod_base = OTHER; note = Phosphorothioate (PS) linkage
  modified_base 118: mod_base = um
  source 1..118: mol_type = other RNA

SEQ ID NO: 131 - RNA, 100 nt, synthetic construct; identical to SEQ ID NO: 48
  modified_base 1: mod_base = gm
  modified_base 2: mod_base = OTHER; note = Phosphorothioate (PS) linkage
  modified_base 2: mod_base = gm
  modified_base 3: mod_base = OTHER; note = Phosphorothioate (PS) linkage
  modified_base 3: mod_base = cm
  modified_base 4: mod_base = OTHER; note = Phosphorothioate (PS) linkage
  modified_base 29: mod_base = gm
  modified_base 30: mod_base = cm
  modified_base 31: mod_base = um
  modified_base 32: mod_base = OTHER; note = 2'-O-methyladenosine
  modified_base 33: mod_base = gm
  modified_base 34: mod_base = OTHER; note = 2'-O-methyladenosine
  modified_base 35: mod_base = OTHER; note = 2'-O-methyladenosine
  modified_base 36: mod_base = OTHER; note = 2'-O-methyladenosine
  modified_base 37: mod_base = um
  modified_base 38: mod_base = OTHER; note = 2'-O-methyladenosine
  modified_base 39: mod_base = gm
  modified_base 40: mod_base = cm
  modified_base 68: mod_base = OTHER; note = 2'-O-methyladenosine
  modified_base 69: mod_base = OTHER; note = 2'-O-methyladenosine
  modified_base 70: mod_base = cm
  modified_base 71: mod_base = um
  modified_base 72: mod_base = um
  modified_base 73: mod_base = gm
  modified_base 74: mod_base = OTHER; note = 2'-O-methyladenosine
  modified_base 75: mod_base = OTHER; note = 2'-O-methyladenosine
  modified_base 76: mod_base = OTHER; note = 2'-O-methyladenosine
  modified_base 77: mod_base = OTHER; note = 2'-O-methyladenosine
  modified_base 78: mod_base = OTHER; note = 2'-O-methyladenosine
  modified_base 79: mod_base = gm
  modified_base 80: mod_base = um
  modified_base 81: mod_base = gm
  modified_base 82: mod_base = gm
  modified_base 83: mod_base = cm
  modified_base 84: mod_base = OTHER; note = 2'-O-methyladenosine
  modified_base 85: mod_base = cm
  modified_base 86: mod_base = cm
  modified_base 87: mod_base = gm
  modified_base 88: mod_base = OTHER; note = 2'-O-methyladenosine
  modified_base 89: mod_base = gm
  modified_base 90: mod_base = um
  modified_base 91: mod_base = cm
  modified_base 92: mod_base = gm
  modified_base 93: mod_base = gm
  modified_base 94: mod_base = um
  modified_base 95: mod_base = gm
  modified_base 96: mod_base = cm
  modified_base 97: mod_base = um
  modified_base 98: mod_base = OTHER; note = Phosphorothioate (PS) linkage
  modified_base 98: mod_base = um
  modified_base 99: mod_base = OTHER; note = Phosphorothioate (PS) linkage
  modified_base 99: mod_base = um
  modified_base 100: mod_base = OTHER; note = Phosphorothioate (PS) linkage
  modified_base 100: mod_base = um
  source 1..100: mol_type = other RNA

SEQ ID NO: 132 - RNA, 100 nt, synthetic construct; identical to SEQ ID NO: 49
  modified_base 1: mod_base = gm
  modified_base 2: mod_base = OTHER; note = Phosphorothioate (PS) linkage
  modified_base 2: mod_base = cm
  modified_base 3: mod_base = OTHER; note = Phosphorothioate (PS) linkage
  modified_base 3: mod_base = cm
  modified_base 4: mod_base = OTHER; note = Phosphorothioate (PS) linkage
  modified_base 29: mod_base = gm
  modified_base 30: mod_base = cm
  modified_base 31: mod_base = um
  modified_base 32: mod_base = OTHER; note = 2'-O-methyladenosine
  modified_base 33: mod_base = gm
  modified_base 34: mod_base = OTHER; note = 2'-O-methyladenosine
  modified_base 35: mod_base = OTHER; note = 2'-O-methyladenosine
  modified_base 36: mod_base = OTHER; note = 2'-O-methyladenosine
  modified_base 37: mod_base = um
  modified_base 38: mod_base = OTHER; note = 2'-O-methyladenosine
  modified_base 39: mod_base = gm
  modified_base 40: mod_base = cm
  modified_base 68: mod_base = OTHER; note = 2'-O-methyladenosine
  modified_base 69: mod_base = OTHER; note = 2'-O-methyladenosine
  modified_base 70: mod_base = cm
  modified_base 71: mod_base = um
  modified_base 72: mod_base = um
  modified_base 73: mod_base = gm
  modified_base 74: mod_base = OTHER; note = 2'-O-methyladenosine
  modified_base 75: mod_base = OTHER; note = 2'-O-methyladenosine
  modified_base 76: mod_base = OTHER; note = 2'-O-methyladenosine
  modified_base 77: mod_base = OTHER; note = 2'-O-methyladenosine
  modified_base 78: mod_base = OTHER; note = 2'-O-methyladenosine
  modified_base 79: mod_base = gm
  modified_base 80: mod_base = um
  modified_base 81: mod_base = gm
  modified_base 82: mod_base = gm
  modified_base 83: mod_base = cm
  modified_base 84: mod_base = OTHER; note = 2'-O-methyladenosine
  modified_base 85: mod_base = cm
  modified_base 86: mod_base = cm
  modified_base 87: mod_base = gm
  modified_base 88: mod_base = OTHER; note = 2'-O-methyladenosine
  modified_base 89: mod_base = gm
  modified_base 90: mod_base = um
  modified_base 91: mod_base = cm
  modified_base 92: mod_base = gm
  modified_base 93: mod_base = gm
  modified_base 94: mod_base = um
  modified_base 95: mod_base = gm
  modified_base 96: mod_base = cm
  modified_base 97: mod_base = um
  modified_base 98: mod_base = OTHER; note = Phosphorothioate (PS) linkage
  modified_base 98: mod_base = um
  modified_base 99: mod_base = OTHER; note = Phosphorothioate (PS) linkage
  modified_base 99: mod_base = um
  modified_base 100: mod_base = OTHER; note = Phosphorothioate (PS) linkage
  modified_base 100: mod_base = um
  source 1..100: mol_type = other RNA

SEQ ID NO: 133 - RNA, 20 nt, synthetic construct
  source 1..20: mol_type = other RNA
tttggtgactgccacgccca

SEQ ID NO: 134 - RNA, 20 nt, synthetic construct
  source 1..20: mol_type = other RNA
cagtgaacaccccttgggcg

SEQ ID NO: 135 - DNA, 20 bp, synthetic construct
  source 1..20: mol_type = other DNA
tttggtgactgccacgccca

SEQ ID NO: 136 - DNA, 20 bp, synthetic construct
  source 1..20: mol_type = other DNA
cagtgaacaccccttgggcg

SEQ ID NO: 137 - RNA, 7265 nt, synthetic construct
  source 1..7265: mol_type = other RNA
aggaaataagagagaaaagaagagtaagaagaaatataagagccaccatgaaacggacagccgacggaagcgagttcgagtcaccaaagaagaagcggaaagtcgacaagaagtacagcatcggcctggacatcggcaccaactctgtgggctgggccgtgatcaccgacgagtacaaggtgcccagcaagaaattcaaggtgctgggcaacaccgaccggcacagcatcaagaagaacctgatcggagccctgctgttcgacagcggcgaaacagccgaggccacccggctgaagagaaccgccagaagaagatacaccagacggaagaaccggatctgctatctgcaagagatcttcagcaacgagatggccaaggtggacgacagcttcttccacagactggaagagtccttcctggtggaagaggataagaagcacgagcggcaccccatcttcggcaacatcgtggacgaggtggcctaccacgagaagtaccccaccatctaccacctgagaaagaaactggtggacagcaccgacaaggccgacctgcggctgatctatctggccctggcccacatgatcaagttccggggccacttcctgatcgagggcgacctgaaccccgacaacagcgacgtggacaagctgttcatccagctggtgcagacctacaaccagctgttcgaggaaaaccccatcaacgccagcggcgtggacgccaaggccatcctgtctgccagactgagcaagagcagaaagctggaaaatctgatcgcccagctgcccggcgagaagaagaatggcctgttcggaaacctgattgccctgagcctgggcctgacccccaacttcaagagcaacttcgacctggccgaggatgccaaactgcagctgagcaaggacacctacgacgacgacctggacaacctgctggcccagatcggcgaccagtacgccgacctgtttctggccgccaagaacctgtccgacgccatcctgctgagcgacatcctgagagtgaacaccgagatcaccaaggcccccctgagcgcctctatgatcaagagatacgacgagcaccaccaggacctgaccctgctgaaagctctcgtgcggcagcagctgcctgagaagtacaaagagattttcttcgaccagagcaagaacggctacgccggctacattgacggcggagccagccaggaagagttctacaagttcatcaagcccatcctggaaaagatggacggcaccgaggaactgctcgtgaagctgaagagagaggacctgctgcggaagcagcggaccttcgacaacggcagcatcccccaccagatccacctgggagagctgcacgccattctgcggcggcaggaagatttttacccattcctgaaggacaaccgggaaaagatcgagaagatcctgaccttccgcatcccctactacgtgggccctctggccaggggaaacagcagattcgcctggatgaccagaaagagcgaggaaaccatcaccccctggaacttcgaggaagtggtggacaagggcgcttccgcccagagcttcatcgagcggatgaccaacttcgataagaacctgcccaacgagaaggtgctgcccaagcacagcctgctgtacgagtacttcaccgtgtataacgagctgaccaaagtgaaatacgtgaccgagggaatgagaaagcccgccttcctgagcggcgagcagaaaaaggccatcgtggacctgctgttcaagaccaaccggaaagtgaccgtgaagcagctgaaagaggactacttcaagaaaatcgagtgcttcgactccgtggaaatctccggcgtggaagatcggttcaacgcctccctgggcacataccacgatctgctgaaaattatcaaggacaaggacttcctggacaatgaggaaaacgaggacattctggaagatatcgtgctgaccctgacactgtttgaggacagagagatgatcgaggaacggctgaaaacctatgcccacctgttcgacgacaaagtgatgaagcagctgaagcggcggagatacaccggctggggcaggctgagccggaagctgatcaacggcatccgggacaagcagtccggcaagacaatcctggatttcctgaagtccgacggcttcgccaacagaaacttcatgcagctgatccacgacgacagcctgacctttaaagaggacatccagaaagcccaggtgtccggccagggcgatagcctgcacgagcacattgccaatctggccggcagccccgccattaagaagggcatcctgcagacagtgaaggtggtggacgagctcgtgaaagtgatgggccggcacaagcccgagaacatcgtgatcgaaatggccagagagaaccagaccacccagaagggacagaagaacagccgcgagagaatgaagcggatcgaagagggcatcaaagagctgggcagccagatcctgaaagaacaccccgtggaaaacacccagctgcagaacgagaagctgtacctgtactacctgcagaatgggcgggatatgtacgtggaccaggaactggacatcaaccggctgtccgactacgatgtggacgctatcgtgcctcagagctttctgaaggacgactccatcgacaacaaggtgctgaccagaagcgacaagaaccggggcaagagcgacaacgtgccctccgaagaggtcgtgaagaagatgaagaactactggcggcagctgctgaacgccaagctgattacccagagaaagttcgacaatctgaccaaggccgagagaggcggcctgagcgaactggataaggccggcttcatcaagagacagctggtggaaacccggcagatcacaaagcacgtggcacagatcctggactcccggatgaacactaagtacgacgagaatgacaagctgatccgggaagtgaaagtgatcaccctgaagtccaagctggtgtccgatttccggaaggatttccagttttacaaagtgcgcgagatcaacaactaccaccacgcccacgacgcctacctgaacgccgtcgtgggaaccgccctgatcaaaaagtaccctaagctggaaagcgagttcgtgtacggcgactacaaggtgtacgacgtgcggaagatgatcgccaagagcgagcaggaaatcggcaaggctaccgccaagtacttcttctacagcaacatcatgaactttttcaagaccgagattaccctggccaacggcgagatccggaagcggcctctgatcgagacaaacggcgaaaccggggagatcgtgtgggataagggccgggattttgccaccgtgcggaaagtgctgagcatgccccaagtgaatatcgtgaaaaagaccgaggtgcagacaggcggcttcagcaaagagtctatcctgcccaagaggaacagcgataagctgatcgccagaaagaaggactgggaccctaagaagtacggcggcttcgacagccccaccgtggcctattctgtgctggtggtggccaaagtggaaaagggcaagtccaagaaactgaagagtgtgaaagagctgctggggatcaccatcatggaaagaagcagcttcgagaagaatcccatcgactttctggaagccaagggctacaaagaagtgaaaaaggacctgatcatcaagctgcctaagtactccctgttcgagctggaaaacggccggaagagaatgctggcctctgccggcgaactgcagaagggaaacgaactggccctgccctccaaatatgtgaacttcctgtacctggccagccactatgagaagctgaagggctcccccgaggataatgagcagaaacagctgtttgtggaacagcacaagcactacctggacgagatcatcgagcagatcagcgagttctccaagagagtgatcctggccgacgctaatctggacaaagtgctgtccgcctacaacaagcaccgggataagcccatcagagagcaggccgagaatatcatccacctgtttaccctgaccaatctgggagcccctgccgccttcaagtactttgacaccaccatcgaccggaagaggtacaccagcaccaaagaggtgctggacgccaccctgatccaccagagcatcaccggcctgtacgagacacggatcgacctgtctcagctgggaggtgactccggcggaagctctggtggcagcaagcggaccgccgacggctctgaattcgagagccctaagaagaaaagaaaggtgagcggaggctctagcggcggaagcaccctgaacattgaagacgagtatagactgcatgaaacaagcaaggaacccgacgtgtccctgggctccacctggctgtccgactttccccaggcctgggccgagacaggaggaatgggcctggccgtgcggcaggcacccctgatcatccctctgaaggccacctctacacccgtgagcatcaagcagtaccctatgtctcaggaggccagactgggcatcaagcctcacatccagaggctgctggaccagggcatcctggtgccatgccagagcccctggaacacaccactgctgcccgtgaagaagccaggcaccaatgactatagacccgtgcaggatctgagagaggtgaacaagagggtggaggatatccaccccaccgtgcccaacccttacaatctgctgtccggcctgcccccttctcaccagtggtatacagtgctggacctgaaggatgccttcttttgtctgagactgcaccctaccagccagccactgttcgcctttgagtggagggaccctgagatgggcatctctggccagctgacctggacacgcctgcctcagggcttcaagaatagcccaacactgtttaacgaggccctgcaccgcgacctggcagatttccggatccagcacccagatctgatcctgctgcagtacgtggacgatctgctgctggccgccaccagcgagctggattgccagcagggaacacgcgccctgctgcagaccctgggaaacctgggatatagggcatccgccaagaaggcccagatctgtcagaagcaggtgaagtacctgggctatctgctgaaggagggccagagatggctgacagaggccaggaaggagacagtgatgggccagccaacacccaagaccccaagacagctgagggagttcctgggcaaagcaggattttgcaggctgttcatcccaggattcgcagagatggcagcacctctgtacccactgaccaagccgggcaccctgtttaattggggccctgaccagcagaaggcctatcaggagatcaagcaggccctgctgacagcaccagccctgggcctgccagacctgaccaagcctttcgagctgtttgtggatgagaagcagggctacgccaagggcgtgctgacccagaagctgggaccatggagacggcccgtggcctatctgtccaagaagctggacccagtggcagcaggatggccaccatgcctgaggatggtggcagcaatcgccgtgctgacaaaggatgccggcaagctgaccatgggacagccactggtcatcctggcaccacacgcagtggaggccctggtgaagcagcctccagatcgctggctgtctaacgcccggatgacacactaccaggccctgctgctggacaccgatcgcgtgcagtttggccctgtggtggccctgaatccagccaccctgctgcctctgccagaggagggcctgcagcacaactgtctggacatcctggcagaggcacacggaacaaggccagacctgaccgatcagcccctgcctgacgccgatcacacatggtataccgatggaagctccctgctgcaggagggccagaggaaggcaggagcagcagtgaccacagagacagaagtgatctgggccaaggccctgccagcaggcacatccgcccagcgggccgagctgatcgccctgacccaggccctgaagatggccgagggcaagaagctgaacgtgtacacagactccagatatgccttcgccaccgcacacatccacggagagatctacaggcgccggggctggctgacctctgagggcaaggagatcaagaacaaggatgagatcctggccctgctgaaggccctgtttctgcccaagcggctgagcatcatccactgtcctggacaccagaagggacactccgccgaggcaaggggcaatcggatggccgaccaggccgccagaaaggctgctattactgaaactcccgacacttccactctgctgattgaaaactcctccccttctggcggctcaaaaagaaccgccgacggcagcgaattcgagtctcccaagaagaagaggaaagtcggctctggccctgccgctaagagagtgaagctggactgagctggagcctcggtggccatgcttcttgccccttgggcctccccccagcccctcctccccttcctgcacccgtacccccgtggtctttgaataaagtctgagtgggcggcaatcaacctctggattacaaaatttgtgaaagattgactgatattcttaactatgttgctccttttacgctgtgtggatatgctgctttaatgcctctgtatcatgctattgcttcccgtacggctttcgttttctcctccttgtataaatcctggttgctgtctctttatgaggagttgtggcccgttgtccgtcaacgtggcgtggtgtgctctgtgtttgctgacgcaacccccactggctggggcattgccaccacctgtcaactcctttctgggactttcgctttccccctcccgatcgccacggcagaactcatcgccgcctgccttgcccgctgctggacaggggctaggttgctgggcactgataattccgtggtgttgtcggggaagctgacgtcctttccagggctgctcgcctgtgttgccaactggatcctgcgcgggacgtccttctgctacgtcccttcggctctcaatccagcggacctcccttcccgaggccttctgccggttctgcggcctctcccgcgtcttcgctttcggcctccgacgagtcggatctccctttgggccgcctccccgcctgaaaaaaaaaaaaaaaaaaaaaaaaaaaaaagcatatgactaaaaaaaaaaaaaaaaaaaaaaaaaaaaaaaaaaaaaaaaaaaaaaaaaaaaaaaaaaaaaaaaaaaaaaaaaaaaaaaa

SEQ ID NO: 138 - RNA, 7275 nt, synthetic construct
  source 1..7275: mol_type = other RNA
aggaaataagagagaaaagaagagtaagaagaaatataagagccaccatgaaacggacagccgacggaagcgagttcgagtcaccaaagaagaagcggaaagtcgacaagaagtacagcatcggcctggacatcggcaccaactctgtgggctgggccgtgatcaccgacgagtacaaggtgcccagcaagaaattcaaggtgctgggcaacaccgaccggcacagcatcaagaagaacctgatcggagccctgctgttcgacagcggcgaaacagccgaggccacccggctgaagagaaccgccagaagaagatacaccagacggaagaaccggatctgctatctgcaagagatcttcagcaacgagatggccaaggtggacgacagcttcttccacagactggaagagtccttcctggtggaagaggataagaagcacgagcggcaccccatcttcggcaacatcgtggacgaggtggcctaccacgagaagtaccccaccatctaccacctgagaaagaaactggtggacagcaccgacaaggccgacctgcggctgatctatctggccctggcccacatgatcaagttccggggccacttcctgatcgagggcgacctgaaccccgacaacagcgacgtggacaagctgttcatccagctggtgcagacctacaaccagctgttcgaggaaaaccccatcaacgccagcggcgtggacgccaaggccatcctgtctgccagactgagcaagagcagaaagctggaaaatctgatcgcccagctgcccggcgagaagaagaatggcctgttcggaaacctgattgccctgagcctgggcctgacccccaacttcaagagcaacttcgacctggccgaggatgccaaactgcagctgagcaaggacacctacgacgacgacctggacaacctgctggcccagatcggcgaccagtacgccgacctgtttctggccgccaagaacctgtccgacgccatcctgctgagcgacatcctgagagtgaacaccgagatcaccaaggcccccctgagcgcctctatgatcaagagatacgacgagcaccaccaggacctgaccctgctgaaagctctcgtgcggcagcagctgcctgagaagtacaaagagattttcttcgaccagagcaagaacggctacgccggctacattgacggcggagccagccaggaagagttctacaagttcatcaagcccatcctggaaaagatggacggcaccgaggaactgctcgtgaagctgaagagagaggacctgctgcggaagcagcggaccttcgacaacggcagcatcccccaccagatccacctgggagagctgcacgccattctgcggcggcaggaagatttttacccattcctgaaggacaaccgggaaaagatcgagaagatcctgaccttccgcatcccctactacgtgggccctctggccaggggaaacagcagattcgcctggatgaccagaaagagcgaggaaaccatcaccccctggaacttcgaggaagtggtggacaagggcgcttccgcccagagcttcatcgagcggatgaccaacttcgataagaacctgcccaacgagaaggtgctgcccaagcacagcctgctgtacgagtacttcaccgtgtataacgagctgaccaaagtgaaatacgtgaccgagggaatgagaaagcccgccttcctgagcggcgagcagaaaaaggccatcgtggacctgctgttcaagaccaaccggaaagtgaccgtgaagcagctgaaagaggactacttcaagaaaatcgagtgcttcgactccgtggaaatctccggcgtggaagatcggttcaacgcctccctgggcacataccacgatctgctgaaaattatcaaggacaaggacttcctggacaatgaggaaaacgaggacattctggaagatatcgtgctgaccctgacactgtttgaggacagagagatgatcgaggaacggctgaaaacctatgcccacctgttcgacgacaaagtgatgaagcagctgaagcggcggagatacaccggctggggcaggctgagccggaagctgatcaacggcatccgggacaagcagtccggcaagacaatcctggatttcctgaagtccgacggcttcgccaacagaaacttcatgcagctgatccacgacgacagcctgacctttaaagaggacatccagaaagcccaggtgtccggccagggcgatagcctgcacgagcacattgccaatctggccggcagccccgccattaagaagggcatcctgcagacagtgaaggtggtggacgagctcgtgaaagtgatgggccggcacaagcccgagaacatcgtgatcgaaatggccagagagaaccagaccacccagaagggacagaagaacagccgcgagagaatgaagcggatcgaagagggcatcaaagagctgggcagccagatcctgaaagaacaccccgtggaaaacacccagctgcagaacgagaagctgtacctgtactacctgcagaatgggcgggatatgtacgtggaccaggaactggacatcaaccggctgtccgactacgatgtggacgctatcgtgcctcagagctttctgaaggacgactccatcgacaacaaggtgctgaccagaagcgacaagaaccggggcaagagcgacaacgtgccctccgaagaggtcgtgaagaagatgaagaactactggcggcagctgctgaacgccaagctgattacccagagaaagttcgacaatctgaccaaggccgagagaggcggcctgagcgaactggataaggccggcttcatcaagagacagctggtggaaacccggcagatcacaaagcacgtggcacagatcctggactcccggatgaacactaagtacgacgagaatgacaagctgatccgggaagtgaaagtgatcaccctgaagtccaagctggtgtccgatttccggaaggatttccagttttacaaagtgcgcgagatcaacaactaccaccacgcccacgacgcctacctgaacgccgtcgtgggaaccgccctgatcaaaaagtaccctaagctggaaagcgagttcgtgtacggcgactacaaggtgtacgacgtgcggaagatgatcgccaagagcgagcaggaaatcggcaaggctaccgccaagtacttcttctacagcaacatcatgaactttttcaagaccgagattaccctggccaacggcgagatccggaagcggcctctgatcgagacaaacggcgaaaccggggagatcgtgtgggataagggccgggattttgccaccgtgcggaaagtgctgagcatgccccaagtgaatatcgtgaaaaagaccgaggtgcagacaggcggcttcagcaaagagtctatcctgcccaagaggaacagcgataagctgatcgccagaaagaaggactgggaccctaagaagtacggcggcttcgacagccccaccgtggcctattctgtgctggtggtggccaaagtggaaaagggcaagtccaagaaactgaagagtgtgaaagagctgctggggatcaccatcatggaaagaagcagcttcgagaagaatcccatcgactttctggaagccaagggctacaaagaagtgaaaaaggacctgatcatcaagctgcctaagtactccctgttcgagctggaaaacggccggaagagaatgctggcctctgccggcgaactgcagaagggaaacgaactggccctgccctccaaatatgtgaacttcctgtacctggccagccactatgagaagctgaagggctcccccgaggataatgagcagaaacagctgtttgtggaacagcacaagcactacctggacgagatcatcgagcagatcagcgagttctccaagagagtgatcctggccgacgctaatctggacaaagtgctgtccgcctacaacaagcaccgggataagcccatcagagagcaggccgagaatatcatccacctgtttaccctgaccaatctgggagcccctgccgccttcaagtactttgacaccaccatcgaccggaagaggtacaccagcaccaaagaggtgctggacgccaccctgatccaccagagcatcaccggcctgtacgagacacggatcgacctgtctcagctgggaggtgactccggcggaagctctggtggcagcaagcggaccgccgacggctctgaattcgagagccctaagaagaaaagaaaggtgagcggaggctctagcggcggaagcaccctgaacattgaagacgagtatagactgcatgaaacaagcaaggaacccgacgtgtccctgggctccacctggctgtccgactttccccaggcctgggccgagacaggaggaatgggcctggccgtgcggcaggcacccctgatcatccctctgaaggccacctctacacccgtgagcatcaagcagtaccctatgtctcaggaggccagactgggcatcaagcctcacatccagaggctgctggaccagggcatcctggtgccatgccagagcccctggaacacaccactgctgcccgtgaagaagccaggcaccaatgactatagacccgtgcaggatctgagagaggtgaacaagagggtggaggatatccaccccaccgtgcccaacccttacaatctgctgtccggcctgcccccttctcaccagtggtatacagtgctggacctgaaggatgccttcttttgtctgagactgcaccctaccagccagccactgttcgcctttgagtggagggaccctgagatgggcatctctggccagctgacctggacacgcctgcctcagggcttcaagaatagcccaacactgtttaacgaggccctgcaccgcgacctggcagatttccggatccagcacccagatctgatcctgctgcagtacgtggacgatctgctgctggccgccaccagcgagctggattgccagcagggaacacgcgccctgctgcagaccctgggaaacctgggatatagggcatccgccaagaaggcccagatctgtcagaagcaggtgaagtacctgggctatctgctgaaggagggccagagatggctgacagaggccaggaaggagacagtgatgggccagccaacacccaagaccccaagacagctgagggagttcctgggcaaagcaggattttgcaggctgttcatcccaggattcgcagagatggcagcacctctgtacccactgaccaagccgggcaccctgtttaattggggccctgaccagcagaaggcctatcaggagatcaagcaggccctgctgacagcaccagccctgggcctgccagacctgaccaagcctttcgagctgtttgtggatgagaagcagggctacgccaagggcgtgctgacccagaagctgggaccatggagacggcccgtggcctatctgtccaagaagctggacccagtggcagcaggatggccaccatgcctgaggatggtggcagcaatcgccgtgctgacaaaggatgccggcaagctgaccatgggacagccactggtcatcctggcaccacacgcagtggaggccctggtgaagcagcctccagatcgctggctgtctaacgcccggatgacacactaccaggccctgctgctggacaccgatcgcgtgcagtttggccctgtggtggccctgaatccagccaccctgctgcctctgccagaggagggcctgcagcacaactgtctggacatcctggcagaggcacacggaacaaggccagacctgaccgatcagcccctgcctgacgccgatcacacatggtataccgatggaagctccctgctgcaggagggccagaggaaggcaggagcagcagtgaccacagagacagaagtgatctgggccaaggccctgccagcaggcacatccgcccagcgggccgagctgatcgccctgacccaggccctgaagatggccgagggcaagaagctgaacgtgtacacagactccagatatgccttcgccaccgcacacatccacggagagatctacaggcgccggggctggctgacctctgagggcaaggagatcaagaacaaggatgagatcctggccctgctgaaggccctgtttctgcccaagcggctgagcatcatccactgtcctggacaccagaagggacactccgccgaggcaaggggcaatcggatggccgaccaggccgccagaaaggctgctattactgaaactcccgacacttccactctgctgattgaaaactcctccccttctggcggctcaaaaagaaccgccgacggcagcgaattcgagtctcccaagaagaagaggaaagtcggctctggccctgccgctaagagagtgaagctggactgagctggagcctcggtggccatgcttcttgccccttgggcctccccccagcccctcctccccttcctgcacccgtacccccgtggtctttgaataaagtctgagtgggcggcaatcaacctctggattacaaaatttgtgaaagattgactgatattcttaactatgttgctccttttacgctgtgtggatatgctgctttaatgcctctgtatcatgctattgcttcccgtacggctttcgttttctcctccttgtataaatcctggttgctgtctctttatgaggagttgtggcccgttgtccgtcaacgtggcgtggtgtgctctgtgtttgctgacgcaacccccactggctggggcattgccaccacctgtcaactcctttctgggactttcgctttccccctcccgatcgccacggcagaactcatcgccgcctgccttgcccgctgctggacaggggctaggttgctgggcactgataattccgtggtgttgtcggggaagctgacgtcctttccagggctgctcgcctgtgttgccaactggatcctgcgcgggacgtccttctgctacgtcccttcggctctcaatccagcggacctcccttcccgaggccttctgccggttctgcggcctctcccgcgtcttcgctttcggcctccgacgagtcggatctccctttgggccgcctccccgcctgaaaaaaaaaaaaaaaaaaaaaaaaaaaaaaaaaaaaaaaagcatatgactaaaaaaaaaaaaaaaaaaaaaaaaaaaaaagcataagactaaaaaaaaaaaaaaaaaaaaaaaaaaaaaaaaaaaaaaaa

SEQ ID NO: 139 - RNA, 7275 nt, synthetic construct
  source 1..7275: mol_type = other RNA
aggaaataagagagaaaagaagagtaagaagaaatataagagccaccatgaaacggacagccgacggaagcgagttcgagtcaccaaagaagaagcggaaagtcgacaagaagtacagcatcggcctggacatcggcaccaactctgtgggctgggccgtgatcaccgacgagtacaaggtgcccagcaagaaattcaaggtgctgggcaacaccgaccggcacagcatcaagaagaacctgatcggagccctgctgttcgacagcggcgaaacagccgaggccacccggctgaagagaaccgccagaagaagatacaccagacggaagaaccggatctgctatctgcaagagatcttcagcaacgagatggccaaggtggacgacagcttcttccacagactggaagagtccttcctggtggaagaggataagaagcacgagcggcaccccatcttcggcaacatcgtggacgaggtggcctaccacgagaagtaccccaccatctaccacctgagaaagaaactggtggacagcaccgacaaggccgacctgcggctgatctatctggccctggcccacatgatcaagttccggggccacttcctgatcgagggcgacctgaaccccgacaacagcgacgtggacaagctgttcatccagctggtgcagacctacaaccagctgttcgaggaaaaccccatcaacgccagcggcgtggacgccaaggccatcctgtctgccagactgagcaagagcagaaagctggaaaatctgatcgcccagctgcccggcgagaagaagaatggcctgttcggaaacctgattgccctgagcctgggcctgacccccaacttcaagagcaacttcgacctggccgaggatgccaaactgcagctgagcaaggacacctacgacgacgacctggacaacctgctggcccagatcggcgaccagtacgccgacctgtttctggccgccaagaacctgtccgacgccatcctgctgagcgacatcctgagagtgaacaccgagatcaccaaggcccccctgagcgcctctatgatcaagagatacgacgagcaccaccaggacctgaccctgctgaaagctctcgtgcggcagcagctgcctgagaagtacaaagagattttcttcgaccagagcaagaacggctacgccggctacattgacggcggagccagccaggaagagttctacaagttcatcaagcccatcctggaaaagatggacggcaccgaggaactgctcgtgaagctgaagagagaggacctgctgcggaagcagcggaccttcgacaacggcagcatcccccaccagatccacctgggagagctgcacgccattctgcggcggcaggaagatttttacccattcctgaaggacaaccgggaaaagatcgagaagatcctgaccttccgcatcccctactacgtgggccctctggccaggggaaacagcagattcgcctggatgaccagaaagagcgaggaaaccatcaccccctggaacttcgaggaagtggtggacaagggcgcttccgcccagagcttcatcgagcggatgaccaacttcgataagaacctgcccaacgagaaggtgctgcccaagcacagcctgctgtacgagtacttcaccgtgtataacgagctgaccaaagtgaaatacgtgaccgagggaatgagaaagcccgccttcctgagcggcgagcagaaaaaggccatcgtggacctgctgttcaagaccaaccggaaagtgaccgtgaagcagctgaaagaggactacttcaagaaaatcgagtgcttcgactccgtggaaatctccggcgtggaagatcggttcaacgcctccctgggcacataccacgatctgctgaaaattatcaaggacaaggacttcctggacaatgaggaaaacgaggacattctggaagatatcgtgctgaccctgacactgtttgaggacagagagatgatcgaggaacggctgaaaacctatgcccacctgttcgacgacaaagtgatgaagcagctgaagcggcggagatacaccggctggggcaggctgagccggaagctgatcaacggcatccgggacaagcagtccggcaagacaatcctggatttcctgaagtccgacggcttcgccaacagaaacttcatgcagctgatccacgacgacagcctgacctttaaagaggacatccagaaagcccaggtgtccggccagggcgatagcctgcacgagcacattgccaatctggccggcagccccgccattaagaagggcatcctgcagacagtgaaggtggtggacgagctcgtgaaagtgatgggccggcacaagcccgagaacatcgtgatcgaaatggccagagagaaccagaccacccagaagggacagaagaacagccgcgagagaatgaagcggatcgaagagggcatcaaagagctgggcagccagatcctgaaagaacaccccgtggaaaacacccagctgcagaacgagaagctgtacctgtactacctgcagaatgggcgggatatgtacgtggaccaggaactggacatcaaccggctgtccgactacgatgtggacgctatcgtgcctcagagctttctgaaggacgactccatcgacaacaaggtgctgaccagaagcgacaagaaccggggcaagagcgacaacgtgccctccgaagaggtcgtgaagaagatgaagaactactggcggcagctgctgaacgccaagctgattacccagagaaagttcgacaatctgaccaaggccgagagaggcggcctgagcgaactggataaggccggcttcatcaagagacagctggtggaaacccggcagatcacaaagcacgtggcacagatcctggactcccggatgaacactaagtacgacgagaatgacaagctgatccgggaagtgaaagtgatcaccctgaagtccaagctggtgtccgatttccggaaggatttccagttttacaaagtgcgcgagatcaacaactaccaccacgcccacgacgcctacctgaacgccgtcgtgggaaccgccctgatcaaaaagtaccctaagctggaaagcgagttcgtgtacggcgactacaaggtgtacgacgtgcggaagatgatcgccaagagcgagcaggaaatcggcaaggctaccgccaagtacttcttctacagcaacatcatgaactttttcaagaccgagattaccctggccaacggcgagatccggaagcggcctctgatcgagacaaacggcgaaaccggggagatcgtgtgggataagggccgggattttgccaccgtgcggaaagtgctgagcatgccccaagtgaatatcgtgaaaaagaccgaggtgcagacaggcggcttcagcaaagagtctatcctgcccaagaggaacagcgataagctgatcgccagaaagaaggactgggaccctaagaagtacggcggcttcgacagccccaccgtggcctattctgtgctggtggtggccaaagtggaaaagggcaagtccaagaaactgaagagtgtgaaagagctgctggggatcaccatcatggaaagaagcagcttcgagaagaatcccatcgactttctggaagccaagggctacaaagaagtgaaaaaggacctgatcatcaagctgcctaagtactccctgttcgagctggaaaacggccggaagagaatgctggcctctgccggcgaactgcagaagggaaacgaactggccctgccctccaaatatgtgaacttcctgtacctggccagccactatgagaagctgaagggctcccccgaggataatgagcagaaacagctgtttgtggaacagcacaagcactacctggacgagatcatcgagcagatcagcgagttctccaagagagtgatcctggccgacgctaatctggacaaagtgctgtccgcctacaacaagcaccgggataagcccatcagagagcaggccgagaatatcatccacctgtttaccctgaccaatctgggagcccctgccgccttcaagtactttgacaccaccatcgaccggaagaggtacaccagcaccaaagaggtgctggacgccaccctgatccaccagagcatcaccggcctgtacgagacacggatcgacctgtctcagctgggaggtgactccggcggaagctctggtggcagcaagcggaccgccgacggctctgaattcgagagccctaagaagaaaagaaaggtgagcggaggctctagcggcggaagcaccctgaacattgaagacgagtatagactgcatgaaacaagcaaggaacccgacgtgtccctgggctccacctggctgtccgactttccccaggcctgggccgagacaggaggaatgggcctggccgtgcggcaggcacccctgatcatccctctgaaggccacctctacacccgtgagcatcaagcagtaccctatgtctcaggaggccagactgggcatcaagcctcacatccagaggctgctggaccagggcatcctggtgccatgccagagcccctggaacacaccactgctgcccgtgaagaagccaggcaccaatgactatagacccgtgcaggatctgagagaggtgaacaagagggtggaggatatccaccccaccgtgcccaacccttacaatctgctgtccggcctgcccccttctcaccagtggtatacagtgctggacctgaaggatgccttcttttgtctgagactgcaccctaccagccagccactgttcgcctttgagtggagggaccctgagatgggcatctctggccagctgacctggacacgcctgcctcagggcttcaagaatagcccaacactgtttaacgaggccctgcaccgcgacctggcagatttccggatccagcacccagatctgatcctgctgcagtacgtggacgatctgctgctggccgccaccagcgagctggattgccagcagggaacacgcgccctgctgcagaccctgggaaacctgggatatagggcatccgccaagaaggcccagatctgtcagaagcaggtgaagtacctgggctatctgctgaaggagggccagagatggctgacagaggccaggaaggagacagtgatgggccagccaacacccaagaccccaagacagctgagggagttcctgggcaaagcaggattttgcaggctgttcatcccaggattcgcagagatggcagcacctctgtacccactgaccaagccgggcaccctgtttaattggggccctgaccagcagaaggcctatcaggagatcaagcaggccctgctgacagcaccagccctgggcctgccagacctgaccaagcctttcgagctgtttgtggatgagaagcagggctacgccaagggcgtgctgacccagaagctgggaccatggagacggcccgtggcctatctgtccaagaagctggacccagtggcagcaggatggccaccatgcctgaggatggtggcagcaatcgccgtgctgacaaaggatgccggcaagctgaccatgggacagccactggtcatcctggcaccacacgcagtggaggccctggtgaagcagcctccagatcgctggctgtctaacgcccggatgacacactaccaggccctgctgctggacaccgatcgcgtgcagtttggccctgtggtggccctgaatccagccaccctgctgcctctgccagaggagggcctgcagcacaactgtctggacatcctggcagaggcacacggaacaaggccagacctgaccgatcagcccctgcctgacgccgatcacacatggtataccgatggaagctccctgctgcaggagggccagaggaaggcaggagcagcagtgaccacagagacagaagtgatctgggccaaggccctgccagcaggcacatccgcccagcgggccgagctgatcgccctgacccaggccctgaagatggccgagggcaagaagctgaacgtgtacacagactccagatatgccttcgccaccgcacacatccacggagagatctacaggcgccggggctggctgacctctgagggcaaggagatcaagaacaaggatgagatcctggccctgctgaaggccctgtttctgcccaagcggctgagcatcatccactgtcctggacaccagaagggacactccgccgaggcaaggggcaatcggatggccgaccaggccgccagaaaggctgctattactgaaactcccgacacttccactctgctgattgaaaactcctccccttctggcggctcaaaaagaaccgccgacggcagcgaattcgagtctcccaagaagaagaggaaagtcggctctggccctgccgctaagagagtgaagctggactgagctggagcctcggtggccatgcttcttgccccttgggcctccccccagcccctcctccccttcctgcacccgtacccccgtggtctttgaataaagtctgagtgggcggcaatcaacctctggattacaaaatttgtgaaagattgactgatattcttaactatgttgctccttttacgctgtgtggatatgctgctttaatgcctctgtatcatgctattgcttcccgtacggctttcgttttctcctccttgtataaatcctggttgctgtctctttatgaggagttgtggcccgttgtccgtcaacgtggcgtggtgtgctctgtgtttgctgacgcaacccccactggctggggcattgccaccacctgtcaactcctttctgggactttcgctttccccctcccgatcgccacggcagaactcatcgccgcctgccttgcccgctgctggacaggggctaggttgctgggcactgataattccgtggtgttgtcggggaagctgacgtcctttccagggctgctcgcctgtgttgccaactggatcctgcgcgggacgtccttctgctacgtcccttcggctctcaatccagcggacctcccttcccgaggccttctgccggttctgcggcctctcccgcgtcttcgctttcggcctccgacgagtcggatctccctttgggccgcctccccgcctgaaaaaaaaaaaaaaacaaaaaaaaaaaaaaaaaaaaaaaaaaaccaaaaaaaaaaaaaaaaaaaaaaaaaaaaaaaaaaaccccaaaaaaaaaaaaaaaaaaaaaaaaaaaaaaaaaaaaaaaaaaaaaa

SEQ ID NO: 140 - RNA, 7275 nt, synthetic construct
  source 1..7275: mol_type = other RNA
aggaaataagagagaaaagaagagtaagaagaaatataagagccaccatgaaacggacagccgacggaagcgagttcgagtcaccaaagaagaagcggaaagtcgacaagaagtacagcatcggcctggacatcggcaccaactctgtgggctgggccgtgatcaccgacgagtacaaggtgcccagcaagaaattcaaggtgctgggcaacaccgaccggcacagcatcaagaagaacctgatcggagccctgctgttcgacagcggcgaaacagccgaggccacccggctgaagagaaccgccagaagaagatacaccagacggaagaaccggatctgctatctgcaagagatcttcagcaacgagatggccaaggtggacgacagcttcttccacagactggaagagtccttcctggtggaagaggataagaagcacgagcggcaccccatcttcggcaacatcgtggacgaggtggcctaccacgagaagtaccccaccatctaccacctgagaaagaaactggtggacagcaccgacaaggccgacctgcggctgatctatctggccctggcccacatgatcaagttccggggccacttcctgatcgagggcgacctgaaccccgacaacagcgacgtggacaagctgttcatccagctggtgcagacctacaaccagctgttcgaggaaaaccccatcaacgccagcggcgtggacgccaaggccatcctgtctgccagactgagcaagagcagaaagctggaaaatctgatcgcccagctgcccggcgagaagaagaatggcctgttcggaaacctgattgccctgagcctgggcctgacccccaacttcaagagcaacttcgacctggccgaggatgccaaactgcagctgagcaaggacacctacgacgacgacctggacaacctgctggcccagatcggcgaccagtacgccgacctgtttctggccgccaagaacctgtccgacgccatcctgctgagcgacatcctgagagtgaacaccgagatcaccaaggcccccctgagcgcctctatgatcaagagatacgacgagcaccaccaggacctgaccctgctgaaagctctcgtgcggcagcagctgcctgagaagtacaaagagattttcttcgaccagagcaagaacggctacgccggctacattgacggcggagccagccaggaagagttctacaagttcatcaagcccatcctggaaaagatggacggcaccgaggaactgctcgtgaagctgaagagagaggacctgctgcggaagcagcggaccttcgacaacggcagcatcccccaccagatccacctgggagagctgcacgccattctgcggcggcaggaagatttttacccattcctgaaggacaaccgggaaaagatcgagaagatcctgaccttccgcatcccctactacgtgggccctctggccaggggaaacagcagattcgcctggatgaccagaaagagcgaggaaaccatcaccccctggaacttcgaggaagtggtggacaagggcgcttccgcccagagcttcatcgagcggatgaccaacttcgataagaacctgcccaacgagaaggtgctgcccaagcacagcctgctgtacgagtacttcaccgtgtataacgagctgaccaaagtgaaatacgtgaccgagggaatgagaaagcccgccttcctgagcggcgagcagaaaaaggccatcgtggacctgctgttcaagaccaaccggaaagtgaccgtgaagcagctgaaagaggactacttcaagaaaatcgagtgcttcgactccgtggaaatctccggcgtggaagatcggttcaacgcctccctgggcacataccacgatctgctgaaaattatcaaggacaaggacttcctggacaatgaggaaaacgaggacattctggaagatatcgtgctgaccctgacactgtttgaggacagagagatgatcgaggaacggctgaaaacctatgcccacctgttcgacgacaaagtgatgaagcagctgaagcggcggagatacaccggctggggcaggctgagccggaagctgatcaacggcatccgggacaagcagtccggcaagacaatcctggatttcctgaagtccgacggcttcgccaacagaaacttcatgcagctgatccacgacgacagcctgacctttaaagaggacatccagaaagcccaggtgtccggccagggcgatagcctgcacgagcacattgccaatctggccggcagccccgccattaagaagggcatcctgcagacagtgaaggtggtggacgagctcgtgaaagtgatgggccggcacaagcccgagaacatcgtgatcgaaatggccagagagaaccagaccacccagaagggacagaagaacagccgcgagagaatgaagcggatcgaagagggcatcaaagagctgggcagccagatcctgaaagaacaccccgtggaaaacacccagctgcagaacgagaagctgtacctgtactacctgcagaatgggcgggatatgtacgtggaccaggaactggacatcaaccggctgtccgactacgatgtggacgctatcgtgcctcagagctttctgaaggacgactccatcgacaacaaggtgctgaccagaagcgacaagaaccggggcaagagcgacaacgtgccctccgaagaggtcgtgaagaagatgaagaactactggcggcagctgctgaacgccaagctgattacccagagaaagttcgacaatctgaccaaggccgagagaggcggcctgagcgaactggataaggccggcttcatcaagagacagctggtggaaacccggcagatcacaaagcacgtggcacagatcctggactcccggatgaacactaagtacgacgagaatgacaagctgatccgggaagtgaaagtgatcaccctgaagtccaagctggtgtccgatttccggaaggatttccagttttacaaagtgcgcgagatcaacaactaccaccacgcccacgacgcctacctgaacgccgtcgtgggaaccgccctgatcaaaaagtaccctaagctggaaagcgagttcgtgtacggcgactacaaggtgtacgacgtgcggaagatgatcgccaagagcgagcaggaaatcggcaaggctaccgccaagtacttcttctacagcaacatcatgaactttttcaagaccgagattaccctggccaacggcgagatccggaagcggcctctgatcgagacaaacggcgaaaccggggagatcgtgtgggataagggccgggattttgccaccgtgcggaaagtgctgagcatgccccaagtgaatatcgtgaaaaagaccgaggtgcagacaggcggcttcagcaaagagtctatcctgcccaagaggaacagcgataagctgatcgccagaaagaaggactgggaccctaagaagtacggcggcttcgacagccccaccgtggcctattctgtgctggtggtggccaaagtggaaaagggcaagtccaagaaactgaagagtgtgaaagagctgctggggatcaccatcatggaaagaagcagcttcgagaagaatcccatcgactttctggaagccaagggctacaaagaagtgaaaaaggacctgatcatcaagctgcctaagtactccctgttcgagctggaaaacggccggaagagaatgctggcctctgccggcgaactgcagaagggaaacgaactggccctgccctccaaatatgtgaacttcctgtacctggccagccactatgagaagctgaagggctcccccgaggataatgagcagaaacagctgtttgtggaacagcacaagcactacctggacgagatcatcgagcagatcagcgagttctccaagagagtgatcctggccgacgctaatctggacaaagtgctgtccgcctacaacaagcaccgggataagcccatcagagagcaggccgagaatatcatccacctgtttaccctgaccaatctgggagcccctgccgccttcaagtactttgacaccaccatcgaccggaagaggtacaccagcaccaaagaggtgctggacgccaccctgatccaccagagcatcaccggcctgtacgagacacggatcgacctgtctcagctgggaggtgactccggcggaagctctggtggcagcaagcggaccgccgacggctctgaattcgagagccctaagaagaaaagaaaggtgagcggaggctctagcggcggaagcaccctgaacattgaagacgagtatagactgcatgaaacaagcaaggaacccgacgtgtccctgggctccacctggctgtccgactttccccaggcctgggccgagacaggaggaatgggcctggccgtgcggcaggcacccctgatcatccctctgaaggccacctctacacccgtgagcatcaagcagtaccctatgtctcaggaggccagactgggcatcaagcctcacatccagaggctgctggaccagggcatcctggtgccatgccagagcccctggaacacaccactgctgcccgtgaagaagccaggcaccaatgactatagacccgtgcaggatctgagagaggtgaacaagagggtggaggatatccaccccaccgtgcccaacccttacaatctgctgtccggcctgcccccttctcaccagtggtatacagtgctggacctgaaggatgccttcttttgtctgagactgcaccctaccagccagccactgttcgcctttgagtggagggaccctgagatgggcatctctggccagctgacctggacacgcctgcctcagggcttcaagaatagcccaacactgtttaacgaggccctgcaccgcgacctggcagatttccggatccagcacccagatctgatcctgctgcagtacgtggacgatctgctgctggccgccaccagcgagctggattgccagcagggaacacgcgccctgctgcagaccctgggaaacctgggatatagggcatccgccaagaaggcccagatctgtcagaagcaggtgaagtacctgggctatctgctgaaggagggccagagatggctgacagaggccaggaaggagacagtgatgggccagccaacacccaagaccccaagacagctgagggagttcctgggcaaagcaggattttgcaggctgttcatcccaggattcgcagagatggcagcacctctgtacccactgaccaagccgggcaccctgtttaattggggccctgaccagcagaaggcctatcaggagatcaagcaggccctgctgacagcaccagccctgggcctgccagacctgaccaagcctttcgagctgtttgtggatgagaagcagggctacgccaagggcgtgctgacccagaagctgggaccatggagacggcccgtggcctatctgtccaagaagctggacccagtggcagcaggatggccaccatgcctgaggatggtggcagcaatcgccgtgctgacaaaggatgccggcaagctgaccatgggacagccactggtcatcctggcaccacacgcagtggaggccctggtgaagcagcctccagatcgctggctgtctaacgcccggatgacacactaccaggccctgctgctggacaccgatcgcgtgcagtttggccctgtggtggccctgaatccagccaccctgctgcctctgccagaggagggcctgcagcacaactgtctggacatcctggcagaggcacacggaacaaggccagacctgaccgatcagcccctgcctgacgccgatcacacatggtataccgatggaagctccctgctgcaggagggccagaggaaggcaggagcagcagtgaccacagagacagaagtgatctgggccaaggccctgccagcaggcacatccgcccagcgggccgagctgatcgccctgacccaggccctgaagatggccgagggcaagaagctgaacgtgtacacagactccagatatgccttcgccaccgcacacatccacggagagatctacaggcgccggggctggctgacctctgagggcaaggagatcaagaacaaggatgagatcctggccctgctgaaggccctgtttctgcccaagcggctgagcatcatccactgtcctggacaccagaagggacactccgccgaggcaaggggcaatcggatggccgaccaggccgccagaaaggctgctattactgaaactcccgacacttccactctgctgattgaaaactcctccccttctggcggctcaaaaagaaccgccgacggcagcgaattcgagtctcccaagaagaagaggaaagtcggctctggccctgccgctaagagagtgaagctggactgagctggagcctcggtggccatgcttcttgccccttgggcctccccccagcccctcctccccttcctgcacccgtacccccgtggtctttgaataaagtctgagtgggcggcaatcaacctctggattacaaaatttgtgaaagattgactgatattcttaactatgttgctccttttacgctgtgtggatatgctgctttaatgcctctgtatcatgctattgcttcccgtacggctttcgttttctcctccttgtataaatcctggttgctgtctctttatgaggagttgtggcccgttgtccgtcaacgtggcgtggtgtgctctgtgtttgctgacgcaacccccactggctggggcattgccaccacctgtcaactcctttctgggactttcgctttccccctcccgatcgccacggcagaactcatcgccgcctgccttgcccgctgctggacaggggctaggttgctgggcactgataattccgtggtgttgtcggggaagctgacgtcctttccagggctgctcgcctgtgttgccaactggatcctgcgcgggacgtccttctgctacgtcccttcggctctcaatccagcggacctcccttcccgaggccttctgccggttctgcggcctctcccgcgtcttcgctttcggcctccgacgagtcggatctccctttgggccgcctccccgcctgaaaaaaaaaaaaaaataaaaaaaaaaaaaaaaaaaaaaaaaaattaaaaaaaaaaaaaaaaaaaaaaaaaaaaaaaaaaattttaaaaaaaaaaaaaaaaaaaaaaaaaaaaaaaaaaaaaaaaaaaaaa

SEQ ID NO: 141 - protein, 685 aa, synthetic construct
EFQVNDEQLITALSLTISCVGPKPENHNFERILSKTYPLVWATDIPGKSKRATPIVVELKVGARPVVRKQYPLRIEDRKGIEPIIKRFLELGLLVECESDFNTPILPVKKPNGTYRLVQDLRAVNEITKTLHPVVANPYTLLTRLKDSLAWFTVLDLKDAFFCLPLAPESQRIFAFEWESVDRGRKTQLTWTRLPQGWSNSPTIFNNQLAKELEQWEGPPGDGALLQYVDDLLIATVTEEECIEWTISLLNFLGLSGYRVSQQKAQLVQKEVVYLGYEISRGQRSLGAARKEAICQMPKPETVRDLRAFLGKTGWCRLFIYQYGILAKPLYDLLKPTKNVLVWTPEAEGAFKRLKRELMRAPALGLPDVSKPFWLFSHERQGMALGVLAQQLGPHKRAVAYFSKRLDEVSKGWPGCLRAVAAVIINIEEARKLTLGQKVTVLVSHTVSAVLEQKGNHWLSPSRFLKYQAILAESDDVTIQVTNIVNPASFLEGRAPAEPIEHDCLETIEAVYSSRPDLKEEPFEDADNWFSDGSSFVKQGVRMAGYAVTTTERVIESNPLPAGTSAQKAELIALTRALELAKDMQINIWTDSKYAFSVVHAHGAIWKERGWLTTQGKTVKHAEEVLRLLEAVQLPTQVAIMHCKGHLKGNTIPEIGNRKADTEAKLAAARNREAEIAALIPGELD

SEQ ID NO: 142 - protein, 1057 aa, synthetic construct
KNSYILGLDVGIASVGYGLIHSDSKSVIDAGVRLFPEANVENNEGRRAKRGSRRLKRRRIHRLDRVKNLLAQYHLIIDDKIPKSTNPYVIRVKGLSSPLSKSELVIALLHLAKRRGIHNVNVVMDENESTNELSTKEQLKENAKQLENRYVCELQLDRLNEQYKVRGERNRFKTEDFVREARQILTTQQKYHDIDEHFIEQYTHLLETRREYYEGPGKGSQYGWDGDLKQWYEMLMGRCTYFPEELRSVKYAYTADLFNALNDLNNLVIARDENEKLEYFEKYHIIENVFKQKKTPTLKQIAKEIDVKESDIKGYRITKNGKPQFTSFKLYHDLNKIFLDKKNLENIELLDEIAFILTLYQDPLSIKEALDQLQTLLTESEKEAIAHLNGYTGTHRLSLKCLHLLIDEMWQTSRNQMEVFTALNLKPQKYQLSKQKQIPKNIVEAFILSPVVKRSFIQSIEIVNTIIKKYGLPEEIIIELAREKNSEDRRKFLNRIQKENENTRKQVEEVIREYGNRNAKGLVEKIKLHQMQEGKCLYSLQNIPLDDLLRNPSHYEIDHIIPRSVSFDNSFNNKVLVKQEEASKKGNRTPYQYLNSNESALSYVQFKQHILNLSKSKERISKKKREYLLEERDINKFEVQKEFINRNLVDTRYATRELVQLLKSYFSANDLDVKVKTINGSFTNYLRKAWKFDKSRNKGFKHHAEDALIIANVSYLFKQSKELKEANAILENNNLSLNRNKDSKNLLTEQDYRKMFEIPKQVQDIKDYKDFKYSHRVDKKPNRQLINDSLYSTREINENHYIVQTVKDIYAKDNTKIKDLFLKTPEKLLMYKHDPQTFEKLMLVIKQYGEEKNPFAKYYEENGEYLTKYAKNEKGPTIKRLKYIGKKVGTHLDISRNFSNAKRKVVQLSIKPFRFDVFHSKAGYHMLTLTYMDIKKKEKHYQILKNEYQALKERYKVPSDAQFIGSFYYNDLISINDELFRVIGVNNSTRNIVELNMVDINYKDYCDLMGIKKTPRIFKTIAKKTEKIEKYSTDILGNQFKVKPSKSPQLIFKRGVL

SEQ ID NO: 143 - protein, 1051 aa, synthetic construct
TRKYILGLDIGIGSVGYGLIDFDTKGIIDAGVRLFPEANSDNNLGRRAKRGARRLKRRRIHRLDRVKSLLSEYKIISDRVPVNNQPYDIRVKGLTERLTKDELAVALLHIAKRRGIHNVDVVMDKDEGDKESLSTKDQINKNAKFLETRYVCELQKERLEKDGLVRGVENRFLTKDIVREAKKIIETQMQYYPEIDDTFKEKYIDLVETRRAYYEGPGQGSLYGWDADVKKWYQLMMGHCTYFPEEYRSVKYAYTADLYNALNDLNNLRISRDENDRLEYHEKYHIVENVFKQKRTPTLKQIAKEIGVEEVDISGYRITKSGKPQFTSFKLYHDLKMVISDQKILENIDLLDQIAEILTIYQDKDSIINELGQLEYLLSEHDKSVISDLTGYTGTHNLSLKCMQMIIEELWHSSMNHMEVFTALNIQPKKYELKGYKRIPTAMIEDAILSPVVKRSFKQAIGVVNAVIKKYGLPKDIIIELARKSNSAEQRRYLNEIQKKNEKMRKRIEEIIKEYGNENAKYLIQKIRLHDAQEGKCLYSLKDIPLNDLLRNPDHYEIDHIIPRSISFDNSMHNKVLVRSEQAAKKSNQTPYQYLTSSNSDIEYSVFKQHILNLGKNKDRMSKKKREYLLEERDITKYDIQKEFINRNLVDTRYATRELTSLLKAYFHINDLDVKVKTINGSFTDFLRKRWRFRKERDEGYKHHAQDALIIANADYLFKEHKLLKEIKDVSDINMHQNSSEIKNDKQYQEVFGNYFKMDDIKNYPITKFSHRVDKKPNRQLINDTIYSTRNIDDKIYVVETLKNIYDRQNDKVKKIFNKYPENILMYQNDLETFKKIHVIMEQYANEKNPLAKYYEETGEFVTKYAKDDNGPVVKKIKYYMKALGEHLDVTHNYSGAKNQVVQLSKKSFRFDIYKSEQGYKMVSLSYLSLNNDKDRYFVNRDEYAQLKKGKQIAETDQFIGSFYTNDIIQLNGEKYRVIGVNNDRRNRIELDRVDIRQTDYVKLHNLKKGDRIFMTIGRNTTDIEKIYTDILGNIYKSKRPKAPQLVFKKG

SEQ ID NO: 144 - protein, 1054 aa, synthetic construct
KTDYILGLDIGITSVGYGIINYNDKSIIDAGVRLFPEANVENNEGRRSKRGARRLKRRRIHRLERVKQLLKDYKLLDSIDVMPQSTNPYEIRVRGLREKLTRDELAIALLHLAKRRGIHNIDVIDQEEDASNELSTKEQLSKNNHLLKDKFVCELLLERYNEGKVRGEKNRFKTADIVKEIKQILETQKETHHLDNSFIDKYVELVETRREYYEGPGEGSPYGWGADLKKWYEHLMGRCTYFPEELRSVKYAYSADLFNALNDLNNLVIQRDGLNKLEYHEKYHIIENVFKQKKKPTLKQIANEIGVKPEDIKGYRITKSGKENFTEFRLYHDLKKSLKDQSILENIQLLDQIAEIITIYQDKESIKKELEQLAEPINEIDKESISNLAGYNGTHRLSLKCINLVLEELWHTPRNQMEIFAYLNIKPRKIDLKKANKIPKDMIDEFILSPVVKRTFGQAINVINKVIEKYGAPKDIIIELARENNTKDKQKFINELQKKNEKTRQRINEIIGKTGNQNAKRLVEKIRLHDEQEGKCLYSLESIPLEDLLNNPNHYEVDHIIPRSVSFDNSYQNKVLVKQTEASKKGNRTPYQYLNSGEAKLSYNQFKQHVLNLSKSKDRISKKKKDYLLEERDINKFEVQKEFINRNLVDTRYATRELTNYLKAYFSANDMDVKVKTINGSFTNHLRKVWEFKKERNHGYKHHAEDALIIANADFLFKESKKLKAANKVLEQPERKEIETKIEVDSDEEYQDLFVIPQQVKEIKEFRDFKYSHRVDKKPNRRLINDTLYSTRVKDDDLYIISPIKNIYSKDNTDLKKHFKKNPEKFLMYQNDPKTFEKLEVIMKQYANEKNPLAKYHEETGDYLTKYSKKNNGPIVKSIKMFGKKVGNHLDVTNQYSNSRNKLVKLSFKSYRFDVYLTDKGYKFVSITYLDVLKKDNYYYIPEAKYEKLKLNKGIDAKAKFIGSFYYNDLIELDGKVYTIIGVNEDKRNIIELNFPEINYKEYCEINGVKGSGRLRITIGKKVNSIRKLSTDVLGNKYYQSCAEKPQLILKKGI

SEQ ID NO: 145 - protein, 1121 aa, synthetic construct
SNGKILGLDIGIASVGVGVIDAQTGEIIHASSRIFPSANAANNAERRTFRGSRRLIRRKKHRIKRLDDLFNDFHINLDGEMSTDNPYVLRVKGLSQKLTVEELYISIKNIMKRRGISYLDDAESDNEAGRSDYAKAIERNRQLLTSKTPGEIQLERLEKYGQLRGNFTIIDEEGQSQQIINVFSTSDYVKEVEKILDCQKMYHKFISDEFCDKLIELLREKRKYYVGPGNEKSRTDYGIYRTDGTTLENLFGILIGKCTFYPDQYRSSRASYTAQEFNFLNDLNNLTVPTETKKLSQEQKEFLVNYAKETSVLGAGKILQQIAKLADCKVEDIRGYRLDNKDKPELHTFETYRAMKGLVPLVDIGVLSREQLDILADILTLNTDFEGIREALKKQLPNVFDEKQVKGLASFRKSKSQLFAKGWHNLSQKIMLEVIPELYATSDEQMTILTRLGKFEKSSVAEYPSSINVDEITDEIYNPVVAKSIRQTIKIINASIKKWGEFDQIVIEMPRDRNEDEEKKRIADGQKANAKEKADSILRAAELYCAGKVLPDYVYNGHNQLATKIRLWYQQGERCIYTGQPISIHDLIHNQNQYEIDHILPLSLTFDDSLSNKVLVLATAAQEKAQRTPYNYLKSATSAWSYREFKDYVTKRKGIGKKKCEYLTFEEDINGFEVRSKFIQRNLVDTRYASKVILNALQDYFKISGIQTKVSVVRGQFTSQLRHKWGIEKTRETYHHHAVDALIIAASSQLRLWKKQESPLVVDYQEGRQVDLETGEILELTDEQYKELVYQPPYQGFVNTISSSAFDNEILFSYQVDSKVNRKISDATIYATRNAQLGKDKTEGIYVLGKIKDIYTQAGYEAFLKRYTKDKTSFLMYHKDLDTWEKVIEIILRDYREYDEKGKEIGNPFERYRRENGYVKKYSRKGNGTAIKSLKYYDNKLGNHIDITPENSRNAVVLQSLKPWRTDVYFNKETGKYEFLGIKYSDLSFEKGTGEYGISQEKYDSIKIAEGVAKKSIFKFTLYKQDLLFIKDIENNFGKLLRFTSKNDTSKHYVELKPYDKNNFGTEEPLLPVLGNVAKSGRCIKGLNKSNISIYKVRTDILGYRHFIKQEGEHPQLKFKK

SEQ ID NO: 146 - protein, 983 aa, synthetic construct
ARILAFDIGISSIGWAFSENDELKDCGVRIFTKVENPKTGESLALPRRLARSARKRYARRKARLNHLKHLIANEFKLNYEDYQSFDESLAKAYKGSLISPYELRFRALNELLSKQDFARVILHIAKRRGYDDIKNSDDKEKGAILKAIKQNEEKLANYQSVGEYLYKEYFQKFKENSKEFTNVRNKKESYERCIAQSFLKDELKLIFKKQREFGFSFSKKFEEEVLSVAFYKRALKDFSHLVGNCSFFTDEKRAPKNSPLAFMFVALTRIINLLNNLKNTEGILYTKDDLNALLNEVLKNGTLTYKQTKKLLGLSDDYEFKGEKGTYFIEFKKYKEFIKALGEHNLSQDDLNEIAKDITLIKDEIKLKKALAKYDLNQNQIDSLSKLEFKDHLNISFKALKLVTPLMLEGKKYDEACNELNLKVAINEDKKDFLPAFNETYYKDEVTNPVVLRAIKEYRKVLNALLKKYGKVHKINIELAREVGKNHSQRAKIEKEQNENYKAKKDAELECEKLGLKINSKNILKLRLFKEQKEFCAYSGEKIKISDLQDEKMLEIDAIYPYSRSFDDSYMNKVLVFTKQNQEKLNQTPFEAFGNDSAKWQKIEVLAKNLPTKKQKRILDKNYKDKEQKNFKDRNLNDTRYIARLVLNYTKDYLDFLPLSDDENTKLNDTQKGSKVHVEAKSGMLTSALRHTWGFSAKDRNNHLHHAIDAVIIAYANNSIVKAFSDFKKEQESNSAELYAKKISELDYKNKRKFFEPFSGFRQKVLDKIDEIFVSKPERKKPSGALHKETFRKEEEFYQSYGGKEGVLKALELGKIRKVKGKIVKNGDMFRVDIFKHKKTNKFYAVPIYTMDFALKVLPNKAVARSKKGEIKDWILMDENYEFCFSLYKDSLILIQTKKMQEPEFVYYNAFTSSTVSLIVSKHDNKFETLSKNQKILFKNANEKEVIAKGIGIQNLKVFEKYIVSALGEVTKAEFRQREDFKK

SEQ ID NO: 147 - protein, 1359 aa, synthetic construct
DKKYSIGLDIGTNSVGWAVITDEYKVPSKKFKVLGNTDRHSIKKNLIGALLFDSGETAEATRLKRTARRRYTRRKNRICYLQEIFSNEMAKVDDSFFHRLEESFLVEEDKKHERHPIFGNIVDEVAYHEKYPTIYHLRKKLVDSTDKADLRLIYLALAHMIKFRGHFLIEGDLNPDNSDVDKLFIQLVQTYNQLFEENPINASGVDAKAILSARLSKSRKLENLIAQLPGEKKNGLFGNLIALSLGLTPNFKSNFDLAEDAKLQLSKDTYDDDLDNLLAQIGDQYADLFLAAKNLSDAILLSDILRVNTEITKAPLSASMIKRYDEHHQDLTLLKALVRQQLPEKYKEIFFDQSKNGYAGYIDGGASQEEFYKFIKPILEKMDGTEELLVKLKREDLLRKQRTFDNGSIPHQIHLGELHAILRRQEDFYPFLKDNREKIEKILTFRIPYYVGPLARGNSRFAWMTRKSEETITPWNFEEVVDKGASAQSFIERMTNFDKNLPNEKVLPKHSLLYEYFTVYNELTKVKYVTEGMRKPAFLSGEQKKAIVDLLFKTNRKVTVKQLKEDYFKKIECFDSVEISGVEDRFNASLGTYHDLLKIIKDKDFLDNEENEDILEDIVLTLTLFEDREMIEERLKTYAHLFDDKVMKQLKRRRYTGWGRLSRKLINGIRDKQSGKTILDFLKSDGFANRNFMQLIHDDSLTFKEDIQKAQVSGQGDSLHEHIANLAGSPAIKKGILQTVKVVDELVKVMGRHKPENIVIEMARENQTTQKGQKNSRERMKRIEEGIKELGSQILKEHPVENTQLQNEKLYLYYLQNGRDMYVDQELDINRLSDYDVDAIVPQSFLKDDSIDNKVLTRSDKNRGKSDNVPSEEVVKKMKNYWRQLLNAKLITQRKFDNLTKAERGGLSELDKAGFIKRQLVETRQITKHVAQILDSRMNTKYDENDKLIREVKVITLKSKLVSDFRKDFQFYKVREINNYHHAHDAYLNAVVGTALIKKYPKLESEFVYGDYKVYDVRKMIAKSEQEIGKATAKYFFYSNIMNFFKTEITLANGEIRKRPLIETNGETGEIVWDKGRDFATVRKVLSMPQVNIVKKTEIQTVGQNGGLFDDNPKSPLEVTPSKLVPLKKELNPKKYGGYQKPTTAYPVLLITDTKQLIPISVMNKKQFEQNPVKFLRDRGYQQVGKNDFIKLPKYTLVDIGDGIKRLWASSKEIHKGNQLVVSKKSQILLYHAHHLDSDLSNDYLQNHNQQFDVLFNEIISFSKKCKLGKEHIQKIENVYSNKKNSASIEELAESFIKLLGFTQLGATSPFNFLGVKLNQKQYKGKKDYILPCTEGTLIRQSITGLYETRVDLSKIGED

SEQ ID NO: 148 - protein, 1052 aa, synthetic construct
NNSYILGLDIGITSVGYGIIDYETRDVIDAGVRLFKEANVENNEGRRSKRGARRLKRRRRHRLQRVKKLLFDYKLLNEDSEISGINPYEARVKGLSEKLSDEQFSAALLHLAKRRGVHNVNDVEEDTGNELSTKEQIARNNKALEDKYVAELQLERLKEQGEVRGAANRFKTSDYIKEAKQLLKTQSNHHKIDETFIETYISLLETRRTYYEGPGEGSPFGWKDIKEWYEMLMGHCTYFPEELRSVKYAYNADLYNALNDLNNLVIARDENEKLEYYEKFQIIENVFKQKKKPTLKQIAKEILVNEEDIKGYRVTSTGKPEFTNFKIYHDIKGITSRKEILENADLLNQIAEILTIYQSAEDIQEELAELEPKLTQEEIEQISNLTGYTGTHRLSLKAINLILDELWNTSDNQMTIFNRLKLVPKKVDLSQQKEIPTSLVDDFILSPVVKRSFIQSIKVINAIIKKFGLPKDIIIELAREKNSKEAQKFINEMQKRNRQTNERIEKIIKETGKEKAKVLIEKIKLHDMQEGKCLYSLESIPLEDLLNNPYHYEVDHIIPRSVSFDNSFNNKVLVKQEEASKKGNRTPFQYLSSSDAKISYEIFKKHILNLSKGKGRVSKKKKEYLLEERDINRFSVQKDFINRNLVDTRYATRELMNLLRSYFRVNDLDVKVKSINGGFTSFLRKKWKFKKERNQGYKHHAEDALVIANADFIFKEWKKLDTTNKVMENQTVEEQQAENMPGIETDDEYKEIFVIPRQIQSIKDFKDYKYSHRVDKKPNRELVNDTLYSTRKDDKGNTLIINNIKGLYDKDNDKLKNLIKKSPEKLLMYHHDPQTYQKLKTIMEQYSNEKNPLYKYHEETGNYLTKYSKKDNGPIIKKVKYYGKKLNAHLDITNDYSNSQNKIVKLSLKPYRFDVYLDNGGYKFVTVKNLDVIKKEGFFKIDSNAYEKAKSEKKIDENAVFIASFYNNDLIKIDGELYRIVGVNNDTRNVVELNMIPITYKEYLENINDKRTPRILKTISQKTYSIEKYSTDILGNLYKVKSKKKPQMIMKG

SEQ ID NO: 149 - protein, 1052 aa, synthetic construct
NNSYILGLDIGITSVGYGIIDYETRDVIDAGVRLFKEANVENNEGRRSKRGARRLKRRRRHRLQRVKKLLFDYKLLNEDSEISGINPYEARVKGLSEKLSDEEFSAALLHLAKRRGVHNVNDVEEDTGNELSTKEQIARNNKALEDKYVAELQLERLKEQGEVRGAANRFKTSDYIKEAKQLLKTQSNHHKIDETFIETYISLLETRRTYYEGPGEGSPFGWKDIKEWYEMLMGHCTYFPEELRSVKYAYNADLYNALNDLNNLVIARDENEKLEYYEKFQIIENVFKQKKKPTLKQIAKEILVNEEDIKGYRVTSTGKPEFTNFKIYHDIKGITSRKEILDNADLLNQIAEILTIYQSAEDIQEELAELEPKLTQEEIEQISNLTGYTGTHRLSLKAINLILDELWHTSDNQMTIFNRLKLVPKKVDLSQQKEIPTSLVDDFILSPVVKRSFIQSIKVINAIIKKFGLPKDIIIELAREKNSKEVQKFINEMQKRNRQTNERIEKIIKETGKEKAKFLIEKIKLHDMQEGKCLYSLESIPLEDLLNNPYHYEVDHIIPRSVSFDNSFNNKVLVKQEEASKKGNRTPFQYLSSSDAKISYETFKKHILNLSKGKGRVSKKKKEYLLEERDINRFSVQKDFINRNLVDTRYATRELMNLLKSYFRVNDLDVKVKSINGGFTSFLRKKWKFKKERNQGYKHHAEDALVIANADFIFKEWKKLDTTNKVMENQTVEEQQAENMPGIETDDEYKEIFVIPRQIQSIKDFKDYKYSHRVDKKPNRELVNDTLYSTRKDDKGNTLIINNIKGLYDKDNDKLKNLIKKSPEKLLMYHHDPQTYQKLKTIMEQYSNEKNPLYKYHEETGNYLTKYSKKDNGPIIKKVKYYGKKLNAHLDITNDYSNSQNKIVKLSLKPYRFDVYLDNGAYKFVTVKNLDVIKKEGFFKIDSNAYEKAKSEKKIDGNAVFIASFYNNDLIKIDGELYRIIGVNNDSVNRVELNMIDITYKEFLENIDDKRTPRILKTISQKTYSIEKYSADILGNLYKVKSKKKPQMIMKG

SEQ ID NO: 150 - protein, 1052 aa, synthetic construct
KRHYILGLDIGITSVGYGIIDYETRDVIDAGVRLFKEANVENNEGRRSKRGARRLKRRRRHRLQRVKKLLFDYNLLTDDSELSDINPYEARVKGLSRKLSEEEFSATLLHLAKRRGVHNVNEVEEDTGKELSTKEQISRNSKALEEKYVAELQLERLKADGEVRGPNNRFKTSDYVKEAKQLLKVQKAYHQLDHSFIDTYIDLLETRRPYYEGPGEGSPFGWKDIKEWYEMLMGHCTYFPEELRSVKYAYNADLYNALNDLNNLVIARDDSEKLTCYEKRQIIENVFKQKKKPTLKQIAKEILVNEEDIKGYRVTSTGKPEFTNFKIYQDIKGITERKEILENAEILDQIAEILTIYQSSEDIQEELAKLNSELTQEEIEQVSKLTGYTGTHSLSLKAINLVLDELWHTSDNQMAIFNRLKLLPKKVDLSQQKEIPANLVDDFILSPVVKRSFIQSIKVINAIIKKYGLPNDIIIELAREKNSKDAQKMINEMQKKNRQTNERIEEIIRTTGKENAKYLIEKIKLHDMQEGKCLYSLEAIPLEDLLNNPFNYEVDHIIPRSVSFDNSFNNKVLVKQEEASKKDNRTPFQYLSSSDSKMDYETFKKHILNLAKGKDRISKKKKDYLLEERDINRFSVQKDFINRNLVDTRYATRELMTLLRSYFRVNNLDVKVKSINGGFTSFLRRKWKFKKERNQGYKHHAEDALIIANADFIFKELKKLDKANTVMENQTVEEKQAESMPEIESNQEYEEIFKTPLEIQAIKDFKDYKYSHRVDKKPNRELVNDTLYSTRKDDKGNTLVVNNLNGLYDKDNDKLKKLINQSPEKLLMYHHDSQTYQKLKLIMEQYDEEKNPLYKYHEETGNYLTKYSKKDNGPVIKKIKYYGNKLNVHLDITDDYPNSRNKVVKLSLKPYRFDVYLDNGVYKFVTIKNLDVIKKENYYEVNSKCYEKSKKLKKISDQAKFIGSFHNNDLIKVNGELYRIIGVNNDLLNRIEVNMVDITYKEYLETMNDKRTPRILKTITGKTQSIKKYSTDILGNLYEVKIKKHPQMIMKG

SEQ ID NO: 151 - protein, 1054 aa, synthetic construct
NNYILGLDIGITSVGYGIVDSDTREIKDAGVRLFPEANVDNNEGRRSKRGARRLKRRRIHRLDRVKHLLAEYDLLDLTNIPKSTNPYQTRVKGLNEKLSKDELVIALLHIAKRRGIHNVNVMMDDNDSGNELSTKDQLKKNAKALSDKYVCELQLERFEQDYKVRGEKNRFKTEDFVREARKLLETQSKFFEIDQTFIMRYIELIETRREYFEGPGKGSPFGWEGNIKKWFEQMMGHCTYFPEELRSVKYSYSAELFNALNDLNNLVITRDEDAKLNYGEKFQIIENVFKQKKTPNLKQIAIEIGVHETEIKGYRVNKSGKPEFTQFKLYHDLKNIFEDPKYLNDIQLMDNIAEIITIYQDAESIIKELNQLPELLSEREKEKISALSGYSGTHRLSLKCINLLLDDLWESSLNQMELFTKLKLKPKKIDLSQQHKIPSKLVDDFILSPVVKRAFIQSIQVVNAIIDKYGLPEDIIIELARENNSDDRRKFLNQLQKQNEETRKQVEKVLREYGNDNAKRIVQKIKLHNMQEGKCLYSLKDIPLEDLLRNPHHYEVDHIIPRSVAFDNSMHNKVLVRADEASKKGNRTPYQYLNSSESSLSYNEFKQHILNLSKTKDRITKKKREYLLEERDINKFDVQKEFINRNLVDTRYATRELTSLLKAYFSANNLDVKVKTINGSFTNYLRKVWKFDKDRNKGYKHHAEDALIIANADFLFKHNKKLRNINKVLDAPSKEVDKKRVTVQSEDEYNQIFEDTQKAQAIKKFEIRKFSHRVDKKPNRQLINDTLYSTRNIDGIEYVVESIKDIYSVNNDKVKTKFKKDPHRLLMYRNDPQTFEKFEKVFKQYESEKNPFAKYYEETGEKIRKFSKTGQGPYINKIKYLRERLGRHCDVTNKYINSRNKIVQLKIYSYRFDIYQYGNNYKMITISYIDLEQKSNYYYISREKYKQKKKDKQIDESYKFIGSFYKNDIINYNGEMYRVIGVNDSEKNKIQLDMIDISIKDYMELNNIKKTGVIYKTIGKSTTHIEKYTTDILGNLYKAASPKKPQLIFKRGME

SEQ ID NO: 152 - protein, 1054 aa, synthetic construct
NNYILGLDIGITSVGYGIVDSDTREIKDAGVRLFPEANVDNNEGRRSKRGARRLKRRRIHRLDRVKHLLAEYNLLDLTNIPKSTNPYQIRVKGLNEKLSKDELVIALLHIAKRRGIHNVNVMMDDNDSGNELSTKDQLKKNAKALSDKYVCELQLERFEQDYKVRGEKNRFKTEDFVREARKLLETQSKFFEIDQTFIMRYIDLVETRREYFEGPGKGSPFGWEGNIKKWFEQMMGHCTYFPEELRSVKYAYSAELFNALNDLNNLVITRDEEAKLNYGEKFQIIENVFKQKKTPNLKQIAKEIGVSETDIKGYRVNKSGKPEFTQFKLYHDLKNIFEDSKYLNDVQLMDNIAEIITIYQDPESIIKELNLLPELLSEKEKEKISALSGYAGTHRLSLKCINLLLDDLWESSLNQMELFTKLNLKPKKIDLSQQHKIPIKLVDDFILSPVVKRAFIQSIQVVNAIIDKYGLPEDIIIELARENNSDDRRKFLNQLQKQNAETRKQVEKVLREYGNDNAKRIVQKIKLHNMQEGKCLYSLKDIPLEDLLKNPNHYEVDHIIPRSVAFDNSMHNKVLVRAEEASKKGNRTPYQYLNSSESSLSYNEFKQHILNLSKTKDRITKKKREYLLEERDINKYDVQKEFINRNLVDTRYATRELTSLLKAYFSANNLDVKVKTINGSFTNYLRKVWKFDKDRNKGYKHHAEDALIIANADFLFKHNKKLRNINKVLDAPSKEIDKKRVTVQSEDEYNQMFEDTQKAQAIKKFEIRKFSHRVDKKPNRQLIKDTLYSTRNIDGIEYVVESIKDIYSVNNDKVKTKFKKDPHRLLMYRNDPQTFEKFEKVFKQYESEKNPFAKYYEETGEKIRKFSKTGQGPYINKIKYLRERLGRHCDVTNKYINSRNKIVQLKIYSYRFDIYQYGNNYKMITISYIDLEQKSNYYYISREKYEQKKKDKQIDDSYKFIGSFYKNDIINYNGEMYRVIGVNDSEKNKIQLDMIDISIKDYMELNNIKKTGVIYKTIGKSTTHIEKYTTDILGNLYKAAPPKKPQLIFKRGME

SEQ ID NO: 153 - protein, 1053 aa, synthetic construct
RNSYILGLDIGITSVGYGIIDRVTREVIDAGVRLFPEANVENNEGRRSKRGARRLKRRRIHRLNRIKQLLKNAGLLEGDVLPKSTNPYEIRVRGLRSPLTKDELVIALLHIAKRRGIHNINIVGDDEETDSTLSTTAQLKKNEKALKGQFVCELQLDRLANAHQVRGEKNRFKTEDIVKEVRALLQQQQNFHNIDNSFVEQYIALLESRRTYYEGPGEGSPYGWDGDIKKWYEMLMGYCTYFPEELRSVKYAYTADLFNALNDLNNLVITRDDNSKLTYAEKYHIIENVFKQKKVPTLKQIAKEIGVNESDIKGYRINKSEKPLFTSFKLYHDLKSVFSDPTKLEDIDLLDRIAVVLTMYQDAESMKAALNTFPEVFSEAEKEKLSALTGYAGTHRLSLKCMNLLIPDLWQTSLNQMELFVKLNLKPQKLDLSQCHQIPTQLVDEFILSPVVKRAFTQSIKVINAIIQKYGLPDDIIIELAREKNSADKRKFLNQLQKKNEKARHEINTLVAQYGQPNAKRLVEKITLHQQQEGKCLYSLKDIPLEQLLKQPYLYEVDHIIPRSVSFDNSMQNKVLVLAEEAAKKGNQTPYQYLNSREASMTYPEFKQHILNLSKAKDRISKKKRNYLLEERDINKFDVQKDFINRNLVDTRYATRELASLLKAYFKTHELPVKVKTINGGFTHYLRKVWKFDKDRNKGYKHHAEDALIIANADFLFKNQTLNKIEAILNEPGREVESDTVKVQSEDNYQDLFENTKKAFAIKNFKDFKFSHRVDQKPNRQLVNDTLYSTREVNEDLYVVQTLKDIYSKDNKDVKRLFDKQPEKFLMFQHDPETFKKFELAMKQYAEEKNPLARYYEEQGYITKYAKKGDGPPVKSLKYIGKKVGKHLDVTGDYEDSNRKLVKLSLKSFRFDIYHTDKGYKMVPITYLDVQKKEKYYYIPTEKYEALKQEKGINQNAQFIGSFYYNDLIEFDGELYRVIGINNGDKNLVELDMVDIRYKEYCELNSITTTPRIVKTISPKTQSIEKYTTDILGNLYKAQPGKKPQFIFNKDED

SEQ ID NO: 154 - protein, 1057 aa, synthetic construct
KNSYILGLDVGIASVGYGLIHSDSKSVIDAGVRLFPEANVENNEGRRAKRGSRRLKRRRIHRLDRVKYLLAQYHLIIDDKIPKSTNPYAIRVKGLSSALSKSELVIALLHLAKRRGIHNVNVVMDENESTNELSTKEQLKENAKQLENRYVCELQLDRLNEQYKVRGERNRFKTEDFVREARQILTTQQKYHDIDEHFIEQYTHLLETRREYYEGPGKGSQYGWEGDLKQWYEMLMGRCTYFPEELRSVKYAYTADLFNALNDLNNLVIARDENEKLEYFEKYHIIENVFKQKKSPTLKQIAKEIDVKESDIKGYRITKNGKPQFTSFKLYHDLNKIFLDKKNLENIELLDEIAFILTLYQDPLSIKEALDQLQDLLTESEKEAIAHLNGYTGTHRLSLKCLHLLIDEMWQTSRNQMEVFTALNLKPQKYQLSKQKQIPKKMVEEFILSPVVKRSFIQSIEIVNTIIKKYGLPEEIIIELAREKNSEDRRKFLNRIQKENENTRKQVEEVIREYGNRNAKGLVEKIKLHQMQEGKCLYSLQNIPLDDLLRNPSHYEIDHIIPRSVSFDNSFNNKVLVKQEEASKKGNRTPYQYLNSNESVLSYVQFKQHILNLSKSKERISKKKREYLLEERDINKFEVQKEFINRNLVDTRYATRELVQLLKSYFSANDLDVKVKTINGSFTNYLRKAWKFDKSRNKGFKHHAEDALIIANVSYLFKQSKELKEANAILENNNLSLNKNKDSKNLLTEQDYRKMFEIPKQVQDIKDYKDFKYSHRVDKKPNRQLINDSLYSTREVNENHYIVQTVKDIYAKDNTKIKDLFLKTPEKLLMYQHDPQTFEKLMLVIKQYGEEKNPFAKYYEENGEYLTKYAKNEKGPTIKRLKYIGKKVGTHLDISTNFSGAKRKVVQLSIKPFRFDVFHSKAGYHMLTLTYMDIKKKEKHYQILKNEYQALKERYKVPSDAQFIGSFYYNDLISINDELFRVIGVNNSTRNVVELNMVDINYKDYCDLMGIKKTPRIFKTITKKTGKIEKYSTDILGNQFKVKPSKSPQLIFKRGVL

SEQ ID NO: 155 - protein, 1367 aa, synthetic construct
DKKYSIGLDIGTNSVGWAVITDEYKVPSKKFKVLGNTDRHSIKKNLIGALLFDSGETAERTRLKRTARRRYTRRKNRICYLQEIFSNEMAKVDDSFFHRLEESFLVEEDKKHERHPIFGNIVDEVAYHEKYPTIYHLRKKLVDSTDKADLRLIYLALAHMIKFRGHFLIEGDLNPDNSDVDKLFIQLVQTYNQLFEENPINASGVDAKAILSARLSKSRRLENLIAQLPGEKKNGLFGNLIALSLGLTPNFKSNFDLAEDAKLQLSKDTYDDDLDNLLAQIGDQYADLFLAAKNLSDAILLSDILRVNTEITKAPLSASMIKRYDEHHQDLTLLKALVRQQLPEKYKEIFFDQSKNGYAGYIDGGASQEEFYKFIKPILEKMDGTEELLVKLNREDLLRKQRTFDNGSIPHQIHLGELHAILRRQEDFYPFLKDNREKIEKILTFRIPYYVGPLARGNSRFAWMTRKSEETITPWNFEEVVDKGASAQSFIERMTNFDKNLPNEKVLPKHSLLYEYFTVYNELTKVKYVTEGMRKPAFLSGEQKKAIVDLLFKTNRKVTVKQLKEDYFKKIECFDSVEISGVEDRFNASLGTYHDLLKIIKDKDFLDNEENEDILEDIVLTLTLFEDREMIEERLKTYAHLFDDKVMKQLKRRRYTGWGRLSRKLINGIRDKQSGKTILDFLKSDGFANRNFMQLIHDDSLTFKEDIQKAQVSGQGDSLHEHIANLAGSPAIKKGILQTVKVVDELVKVMGRHKPENIVIEMARENQTTQKGQKNSRERMKRIEEGIKELGSQILKEHPVENTQLQNEKLYLYYLQNGRDMYVDQELDINRLSDYDVDAIVPQSFLKDDSIDNKVLTRSDKNRGKSDNVPSEEVVKKMKNYWRQLLNAKLITQRKFDNLTKAERGGLSELDKAGFIKRQLVETRQITKHVAQILDSRMNTKYDENDKLIREVKVITLKSKLVSDFRKDFQFYKVREINNYHHAHDAYLNAVVGTALIKKYPKLESEFVYGDYKVYDVRKMIAKSEQEIGKATAKYFFYSNIMNFFKTEITLANGEIRKRPLIETNGETGEIVWDKGRDFATVRKVLSMPQVNIVKKTEVQTGGFSKESIRPKRNSDKLIARKKDWDPKKYGGFLWPTVAYSVLVVAKVEKGKSKKLKSVKELLGITIMERSSFEKNPIDFLEAKGYKEVKKDLIIKLPKYSLFELENGRKRMLASAKQLQKGNELALPSKYVNFLYLASHYEKLKGSPEDNEQKQLFVEQHKHYLDEIIEQISEFSKRVILADANLDKVLSAYNKHRDKPIREQAENIIHLFTLTRLGAPRAFKYFDTTIDPKQYRSTKEVLDATLIHQSITGLYETRIDLSQLGVS

SEQ ID NO: 156 - protein, 1376 aa, synthetic construct
EKKYSIGLDIGTNSVGWAVITDDYKVPSKKFKVLGNTNRKSIKKNLMGALLFDSGETAEATRLKRTARRRYTRRKNRIRYLQEIFANEMAKLDDSFFQRLEESFLVEEDKKNERHPIFGNLADEVAYHRNYPTIYHLRKKLADSPEKADLRLIYLALAHIIKFRGHFLIEGKLNAENSDVAKLFYQLIQTYNQLFEESPLDEIEVDAKGILSARLSKSKRLEKLIAVFPNEKKNGLFGNIIALALGLTPNFKSNFDLTEDAKLQLSKDTYDDDLDELLGQIGDQYADLFSAAKNLSDAILLSDILRSNSEVTKAPLSASMVKRYDEHHQDLALLKTLVRQQFPEKYAEIFKDDTKNGYAGYVGADKKLRKRSGKLATEEEFYKFIKPILEKMDGAEELLAKLNRDDLLRKQRTFDNGSIPHQIHLKELHAILRRQEEFYPFLKENREKIEKILTFRIPYYVGPLARGNSRFAWLTRKSEEAITPWNFEEVVDKGASAQSFIERMTNFDEQLPNKKVLPKHSLLYEYFTVYNELTKVKYVTERMRKPEFLSGEQKKAIVDLLFKTNRKVTVKQLKEDYFKKIECFDSVEIIGVEDRFNASLGTYHDLLKIIKDKDFLDNEENEDILEDIVLTLTLFEDREMIEERLKTYAHLFDDKVMKQLKRRHYTGWGRLSRKMINGIRDKQSGKTILDFLKSDGFSNRNFMQLIHDDSLTFKEEIEKAQVSGQGDSLHEQIADLAGSPAIKKGILQTVKIVDELVKVMGHKPENIVIEMARENQTTTKGLQQSRERKKRIEEGIKELESQILKENPVENTQLQNEKLYLYYLQNGRDMYVDQELDINRLSDYDVDAIVPQSFIKDDSIDNKVLTRSVENRGKSDNVPSEEVVKKMKNYWRQLLNAKLITQRKFDNLTKAERGGLSEADKAGFIKRQLVETRQITKHVARILDSRMNTKRDKNDKPIREVKVITLKSKLVSDFRKDFQLYKVRDINNYHHAHDAYLNAVVGTALIKKYPKLESEFVYGDYKVYDVRKMIAKSEQEIGKATAKRFFYSNIMNFFKTEVKLANGEIRKRPLIETNGETGEVVWNKEKDFATVRKVLAMPQVNIVKKTEVQTGGFSKESIRPKRNSDKLIARKKDWDPKKYGGFLWPTVAYSVLVVAKVEKGKSKKLKSVKELLGITIMERSSFEKNPIDFLEAKGYKEVKKDLIIKLPKYSLFELENGRKRMLASAKQLQKGNELALPSKYVNFLYLASHYEKLKGSPEDNEQKQLFVEQHKHYLDEIIEQISEFSKRVILADANLDKVLSAYNKHRDKPIREQAENIIHLFTLTRLGAPRAFKYFDTTIDPKQYRSTKEVLDATLIHQSITGLYETRIDLSQLGGD

SEQ ID NO: 157 - protein, 1129 aa, synthetic construct
TNGKILGLDIGIASVGVGIIEAKTGKVVHANSRLFSAANAENNAERRGFRGSRRLNRRKKHRVKRVRDLFEKYGIVTDFRNLNLNPYELRVKGLTEQLTNEELFAALRTISKRRGISYLDDAEDDSTGSTDYAKSIDENRRLLKTKTPGQIQLERLEKYGQLRGNFTVYDENGEAHRLINVFSTSDYEKEARKILETQADYNKKITAEFIDDYVEILTQKRKYYHGPGNEKSRTDYGRFRTDGTTLENIFGILIGKCSFYPDEYRASKASYTAQEYNFLNDLNNLKVPTETGKLSTEQKEALVEFAKSTATLGPAKLLKEIAKILDCKVDEIKGYREDDKGKPDLHTFEPYRKLKFNLDSVNIDYLSREVLDKLAGILTLNTEREGIEDAIKRNLPNQFTEEQISEIINVRKSQSTAFNKGWHSFSAKLMNELIPELYATSDEQMTILTRLEKFKVKKKSSKNIKTIDEKEITDEIYNPVVAKSVRQTIKIINAAVKKYGDFDKIVIEMPRDKNADDEKKFINKRNKENKKEKDDALKRAAYLYNGTDKLPDEVFHGNKQLETKIRLWYQQGERCLYSGKPIPIQELVHNSNNFEIDHILPLSLSFDDSLANKVLVYSWTAQEKGQKTPYQVIDSMDAAWSFREMKEYVLKQKGLGKKKRDYLLTTENIDKIEVKKKFIERNLVDTRYASRVVLNSLQSALRELGKDTKVSVVRGQFTSQLRRKWKIDKSRETYHHHAVDALIIAASSQLKLWEKQDNPMFVDYGNNQVVDKQTGEILSVSDNEYKELVFQPPYQGFVNTISSKGFEDEILFSYQVDSKYNRKVSDATIYSTRKAKIGKDKKEETYVLGKIKDIYSQNGFDTFVKKYNKDKTQFLMYQKDPLTWENVIEVILGDYPTTKKSEDGKNDVKCNPFEEYRRENGLICKYSKKGKGTPIKSLKYYDKKLGNCIDITPEESRNKVILQSINPWRADVYFNPETLKYELMGLKYSDLSFEKGTGNYHISQEKYDAIKEKEGIGKKSEFKFTLYRNDLILIKDIASGEQEIYRFLSRTMPNVNHYVELKPYDKEKFDNVQELVEALGEADKVGRCIKGLNKPNISIYKVRTDVLGNKYFVKKEGDKPKLDFKNNKK

SEQ ID NO: 158 - protein, 1126 aa, synthetic construct
SDLVLGLDIGIGSVGVGILNKVTGEIIHKNSRIFPAAQAENNVERRINRQGRRLTRRKKHRRVRLNHLFEESGLITDFTNVSINLNPYQLRVKGLTDELSNEELFIALKNMVKHRGISYLDDASDDGNSSVGDYAQIVKENSKQLETKTPGQIQLERYQKYGQLRGDFTVEEDGKKHRLINVFPTSAYRAEALRILQTQQEFNPQITDEFINSYLQILTGKRKYYHGPGNEKSRTDYGRYTTKKDSEDEYITLDNIFGILIGKCTFYPEEYRAAKASYTAQEFNLLNDLNNLTVPTETKKLSEEQKNQIITNVKNEKAMGPAKLFKYIAKLLSCDVADIKGYRIDKSDKAEIHTFEAYRKMKTLATIDIEQMERENLDKLAYVLTLNTEKEGIQEALEHEFADGTFSQEQIDELVQFRKANSSIFGKGWHSFSVKLMMELIPELYATSEEQMTILTRLGKQKTTSSSNKTKYIDEKQLTEEIYNPVAAKSVRQAIKIVNAAIKEYGDFDNIVIEMARETNEDDEKKAIQKIQKANKDEKDAAMLKAANQYNGKAELPHSVFHGHKQLATKIRLWHQQGERCLYTGKTISIHDLINNSNQFEIDHILPLSITFDDSLANKVLVYATAAQEKGQRTPYQALDSMDDAWSFRELKAFVRDSKALSNKKKEYLLTEEDISKFDVRKKFIERNLVDTRYASRVVLNALQEHFRVHKTDTKVSVVRGQFTSQLRRHWGIEKTRDTYHHHAVDALIIAASSQLNLWKKQKNTLVSYSEDQLLDIETGELISDDEYKESVFKAPYQHFVDTLKSKEFEDSILFSYQVDSKFNRKISDATIYATRQAKVGKDKKDETYVLGKIKDIYSQTGYDAFIKIYKKDKSKFLMYRHDPQTFEKVIEPILENYPNKELNEKGKEVPCNPFLKYKEDHGYIRKYSKKGNGPEIKSLKYYDSKLGNHIDITPKNSNNKVVLQSVSPWRADVYFNKTTGKYEILGLKYADLKFEKGTGTYKISEEKYNDIKIKEGVDSDSEFKFTLYKNDLLLIKDTETKEQQLFRFLSRTMPNVKHYVELKPYDKQKFDDNEELIKILGIVAKGGQCKKGVSKPNISIYKIRTDVLGNQHIIKNEGDKPKLDF

SEQ ID NO: 159 - protein, 1053 aa, synthetic construct
NQKFILGLDIGITSVGYGLIDYETKNIIDAGVRLFPEANVENNEGRRSKRGSRRLYRRRIHRLERVKKLLEDYNLLDQSQIPQSTNPYAIRVKGLSEALSKDELVIALLHIAKRRGIHKIDVIDSNDDVGNELSTKEQLNKNSKLLKDKFVCQIQLERMNEGQVRGEKNRFKTADIIKEIIQLLNVQKNFHQLDENFINKYIELVEMRREYFEGPGKGSPYGWEGDPKAWYETLMGHCTYFPDELRSVKYAYSADLFNALNDLNNLVIQRDGLSKLEYHEKYHIIENVFKQKKKPTLKQIANEINVNPEDIKGYRITKSGKPQFTEFKLYHDLKSVLFDQSILENEDVLDQIAEILTIYQDKDSIKSKLTELDILLNEEDKENIAQLTGYTGTHRLSLKCIRLVLEEQWYSSRNQMEIFTHLNIKPKKINLTAANKIPKAMIDEFILSPVVKRTFGQAINLINKIIEKYGVPEDIIIELARENNSKDKQKFINEMQKKNENTRKRINEIIGKYGNQNAKRLVEKIRLHDEQEGKCLYSLESIPLEDLLNNPNHYEVDHIIPRSVSFDNSYHNKVLVKQSEASKKSNLTPYQYFNSGKSKLSYNQFKQHILNLSKSQDRISKKKKEYLLEERDINKFEVQKEFINRNLVDTRYATRELTNYLKAYFSANNMNVKVKTINGSFTDYLRKVWKFKKERNHGYKHHAEDALIIANADFLFKENKKLKAVNSVLEKPEIETKQLDIQVDSEDNYSEMFIIPKQVQDIKDFRNFKYSHRVDKKPNRQLINKTLYSTRKKDNSTYIVQTIKDIYAKDNTTLKKQFDKSPEKFLMYQHDPRTFEKLEVIMKQYANEKNPLAKYHEETGEYLTKYSKKNNGPIVKSLKYIGNKLGSHLDVTHQFKSSKKKLVKLSIKPYRFDVYLTDKGYKFITISYLDVLKKDNYYYIPEQKYDKLKLGKAIDKNAKFIASFYKNDLIKLDGEIYKIIGVNSDTRNMIELDLPDIRYKEYCELNNIKGEPRIGKTIGKKVNSIEKLTTDVLGNVFTNTQYTKPQLLFKRGN

SEQ ID NO: 160 - protein, 1053 aa, synthetic construct
NQKFILGLDIGITSVGYGLIDYETKNIIDAGVRLFPEANVENNEGRRSKRGSRRLKRRRIHRLERVKKLLEDYNLLDQSQIPQSTNPYAIRVKGLSEALSKDELVIALLHIAKRRGIHKIDVIDSNDDVGNELSTKEQLNKNSKLLKDKFVCQIQLERMNEGQVRGEKNRFKTADIIKEIIQLLNVQKNFHQLDENFINKYIELVEMRREYFEGPGKGSPYGWEGDPKAWYETLMGHCTYFPDELRSVKYAYSADLFNALNDLNNLVIQRDGLSKLEYHEKYHIIENVFKQKKKPTLKQIANEINVNPEDIKGYRITKSGKPQFTEFKLYHDLKSVLFDQSILENEDVLDQIAEILTIYQDKDSIKSKLTELDILLNEEDKENIAQLTGYTGTHRLSLKCIRLVLEEQWYSSRNQMEIFTHLNIKPKKINLTAANKIPKAMIDEFILSPVVKRTFGQAINLINKIIEKYGVPEDIIIELARENNSKDKQKFINEMQKKNENTRKRINEIIGKYGNQNAKRLVEKIRLHDEQEGKCLYSLESIPLEDLLNNPNHYEVDHIIPRSVSFDNSYHNKVLVKQSEASKKSNLTPYQYFNSGKSKLSYNQFKQHILNLSKSQDRISKKKKEYLLEERDINKFEVQKEFINRNLVDTRYATRELTNYLKAYFSANNMNVKVKTINGSFTDYLRKVWKFKKERNHGYKHHAEDALIIANADFLFKENKKLKAVNSVLEKPEIETKQLDIQVDSEDNYSEMFIIPKQVQDIKDFRNFKYSHRVDKKPNRQLINDTLYSTRKKDNSTYIVQTIKDIYAKDNTTLKKQFDKSPEKFLMYQHDPRTFEKLEVIMKQYANEKNPLAKYHEETGEYLTKYSKKNNGPIVKSLKYIGNKLGSHLDVTHQFKSSTKKLVKLSIKPYRFDVYLTDKGYKFITISYLDVLKKDNYYYIPEQKYDKLKLGKAIDKNAKFIASFYKNDLIKLDGEIYKIIGVNSDTRNMIELDLPDIRYKEYCELNNIKGEPRIKKTIGKKVNSIEKLTTDVLGNVFTNTQYTKPQLLFKRGN

SEQ ID NO: 161 - protein, 1056 aa, synthetic construct
NQKFILGLDIGITSVGYGLIDYETKNIIDAGVRLFPEANVENNEGRRSKRGSRRLYRRRIHRLERVKLLLTEYDLINKEQIPTSNNPYQIRVKGLSEILSKDELAIALLHLAKRRGIHNVDVAADKEETASDSLSTKDQINKNAKFLESRYVCELQKERLENEGHVRGVENRFLTKDIVREAKKIIDTQMQYYPEIDETFKEKYISLVETRREYFEGPGQGSPFGWNGDLKKWYEMLMGHCTYFPQELRSVKYAYSADLFNALNDLNNLIIQRDNSEKLEYHEKYHIIENVFKQKKKPTLKQIAKEIGVNPEDIKGYRITKSGTPEFTSFKLFHDLKKVVKDHAILDDIDLLNQIAEILTIYQDKDSIVAELGQLEYLMSEADKQSISELTGYTGTHSLSLKCMNMIIDELWHSSMNQMEVFTYLNMRPKKYELKGYQRIPTDMIDDAILSPVVKRTFIQSINVINKVIEKYGIPEDIIIELARENNSDDRKKFINNLQKKNEATRKRINEIIGQTGNQNAKRIVEKIRLHDQQEGKCLYSLESIPLEDLLNNPNHYEVDHIIPRSVSFDNSYHNKVLVKQSEASKKSNLTPYQYFNSGKSKLSYNQFKQHILNLSKSQDRISKKKKEYLLEERDINKFEVQKEFINRNLVDTRYATRELTNYLKAYFSANNMNVKVKTINGSFTDYLRKVWKFKKERNHGYKHHAEDALIIANADFLFKENKKLKAVNSVLEKPEIETKQLDIQVDSEDNYSEMFIIPKQVQDIKDFRNFKYSHRVDKKPNRQLINKTLYSTRKKDNSTYIVQTIKDIYAKDNTTLKKQFDKSPEKFLMYQHDPRTFEKLEVIMKQYANEKNPLAKYHEETGEYLTKYSKKNNGPIVKSLKYIGNKLGSHLDVTHQFKSSKKKLVKLSIKNYRFDVYLTEKGYKFVTIAYLNVFKKDNYYYIPKDKYQELKEKKKIKDTDQFIASFYKNDLIKLNGDLYKIIGVNSDDRNIIELDYYDIKYKDYCEINNIKGEPRIGKTIGKKTESIEKFTTDVLGNLYLHSTEKAPQLIFKRGL

SEQ ID NO: 162 - protein, 1081 aa, synthetic construct
AAFKPNPINYILGLDIGIASVGWAMVEIDEEENPIRLIDLGVRVFERAEVPKTGDSLAMARRLARSVRRLYRRRAHRLLRARRLLKREGVLQAADFDENGLIKSLPNTPWQLRAAALDRKLTPLEWSAVLLHLIKHRGYLSQRKNEGETADKELGALLKGVANNAHALQTGDFRTPAELALNKFEKESGHIRNQRGDYSHTFSRKDLQAELILLFEKQKEFGNPHVSGGLKEGIETLLMTQRPALSGDAVQKMLGHCTFEPAEPKAAKNTYTAERFIWLTKLNNLRILEQGSERPLTDTERATLMDEPYRKSKLTYAQARKLLGLEDTAFFKGLRYGKDNAEASTLMEMKAYHAISRALEKEGLKDKKSPLNLSSELQDEIGTAFSLFKTDEDITGRLKDRVQPEILEALLKHISFDKFVQISLKALRRIVPLMEQGKRYDEACAEIYGDHYGKKNTEEKIYLPPIPADEIRNPVVLRALSQARKVINGVVRRYGSPARIHIETAREVGKSFKDRKEIEKRQEENRKDREKAAAKFREYFPNFVGEPKSKDILKLRLYEQQHGKCLYSGKEINLVRLNEKGYVEIDAALPFSRTWDDSFNNKVLVLGSENQNKGNQTPYEYFNGKDNSREWQEFKARVETSRFPRSKKQRILLQKFDEDGFKECNLNDTRYVNRFLCQFVADHILLTGKGKRRVFASNGQITNLLRGFWGLRKVRAENDRHHALDAVVVACSTVAMQQKITRFVRYKEMNAFDGKTIDKETGKVLHQKTHFPQPWEFFAQEVMIRVFGKPDGKPEFEEADTPEKLRTLLAEKLSSRPEAVHEYVTPLFVSRAPNRKMSGAHKDTLRSAKRFVKHNEKISVKRVWLTEIKLADLENMVNYKNGREIELYEALKARLEAYGGNAKQAFDPKDNPFYKKGGQLVKAVRVEKTQESGVLLNKKNKYTIADNGDMVRVDVFCKVDKKGKNQYFIVPIYAWQVAENILPDIDCKGYRIDDSYTFCFSLHKYDLIAFQKDKKSKVEFAYYINCDSSNGRFYLAWHDKGSKEQQFRISTQNLVLIQKYQVNELGKEIRPCRLKKRPPVR

SEQ ID NO: 163 - protein, 1100 aa, synthetic construct
WYASLMSAHHLRVGIDVGTHSVGLATLRVDDHGTPIELLSALSHIHDSGVGKEGKKDHDTRKKLSGIARRARRLYHHRRTQLQQLDEVLRDLGFPIPTPGEFLDLNEQTDPYRVWRVRARLVEEKLPEELRGPAISMAVRHIARHRGWRNPYSKVESLLSPAEESPFMKALRERILATTGEVLDDGITPGQAMAQVALTHNISMRGPEGILGKLHQSDNANEIRKICARQGVSPDVCKQLLRAVFKADSPRGSAVSRVAPDPLPGQGSFRRAPKCDPEFQRFRIISIVANLRISETKGENRPLTADERRHVVTFLTEDSQADLTWVDVAEKLGVHRRDLRGTAVHTDDGERSAARPPIDATDRIMRQTKISSLKTWWEEADSEQRGAMIRYLYEDPTDSECAEIIAELPEEDQAKLDSLHLPAGRAAYSRESLTALSDHMLATTDDLHEARKRLFGVDDSWAPPAEAINAPVGNPSVDRTLKIVGRYLSAVESMWGTPEVIHVEHVRDGFTSERMADERDKANRRRYNDNQEAMKKIQRDYGKEGYISRGDIVRLDALELQGCACLYCGTTIGYHTCQLDAIVPQAGPGSNNRRGNLVAVCERCNRSKSNTPFAVWAQKCGIPHVGVKEAIGRVRGWRKQTPNTSSEDLTRLKKEVIARLRRTQEDPEIDERSMESVAWMANELHHRIAAAYPETTVMVYRGSITAAARKAAGIDSRINLIGEKGRKDRIDRRHHAVDASVVALMEASVAKTLAERSSLRGEQRLTGKEQTWKQYTGSTVGAREHFEMWRGHMLHLTELFNERLAEDKVYVTQNIRLRLSDGNAHKVNPSKLVSHRLGDGLTVQQIDRACTPALWCALTREKDFDEKNGLPAREDRAIRVKGHEIKSSDYIQVFSKRKKTDSDRDETPFGAIAVRGGFVEIGPSIHHARIYRVEGKKPVYAMLRVFTHDLLSQRHGDLFSAVIPPQSISMRCAEPKLRKAITTGNATYLGWVVVGDELEINVDSFTKYAIGRFLEDFPNTTRWRICGYDTNSKLTLKPIVLAAEGLENPSSAVNEIVELKGWRVAINVLTKVHPTVVRRDALGRPRYSSRSNLPTSWTIE

SEQ ID NO: 164 - RNA, 122 nt, synthetic construct; identical to SEQ ID NO: 37
  modified_base 1: mod_base = um
  modified_base 2: mod_base = OTHER; note = Phosphorothioate (PS) linkage
  modified_base 2: mod_base = um
  modified_base 3: mod_base = OTHER; note = Phosphorothioate (PS) linkage
  modified_base 3: mod_base = gm
  modified_base 4: mod_base = OTHER; note = Phosphorothioate (PS) linkage
  modified_base 29: mod_base = gm
  modified_base 30: mod_base = cm
  modified_base 31: mod_base = um
  modified_base 32: mod_base = OTHER; note = 2'-O-methyladenosine
  modified_base 33: mod_base = gm
  modified_base 34: mod_base = OTHER; note = 2'-O-methyladenosine
  modified_base 35: mod_base = OTHER; note = 2'-O-methyladenosine
  modified_base 36: mod_base = OTHER; note = 2'-O-methyladenosine
  modified_base 37: mod_base = um
  modified_base 38: mod_base = OTHER; note = 2'-O-methyladenosine
  modified_base 39: mod_base = gm
  modified_base 40: mod_base = cm
  modified_base 68: mod_base = OTHER; note = 2'-O-methyladenosine
  modified_base 69: mod_base = OTHER; note = 2'-O-methyladenosine
  modified_base 70: mod_base = cm
  modified_base 71: mod_base = um
  modified_base 72: mod_base = um
  modified_base 73: mod_base = gm
  modified_base 74: mod_base = OTHER; note = 2'-O-methyladenosine
  modified_base 75: mod_base = OTHER; note = 2'-O-methyladenosine
  modified_base 76: mod_base = OTHER; note = 2'-O-methyladenosine
  modified_base 77: mod_base = OTHER; note = 2'-O-methyladenosine
  modified_base 78: mod_base = OTHER; note = 2'-O-methyladenosine
  modified_base 79: mod_base = gm
  modified_base 80: mod_base = um
  modified_base 81: mod_base = gm
  modified_base 82: mod_base = gm
  modified_base 83: mod_base = cm
  modified_base 84: mod_base = OTHER; note = 2'-O-methyladenosine
  modified_base 85: mod_base = cm
  modified_base 86: mod_base = cm
  modified_base 87: mod_base = gm
  modified_base 88: mod_base = OTHER; note = 2'-O-methyladenosine
  modified_base 89: mod_base = gm
  modified_base 90: mod_base = um
  modified_base 91: mod_base = cm
  modified_base 92: mod_base = gm
  modified_base 93: mod_base = gm
  modified_base 94: mod_base = um
  modified_base 95: mod_base = gm
  modified_base 96: mod_base = cm
  modified_base 97: mod_base = gm
  modified_base 98: mod_base = um
  modified_base 99: mod_base = gm
  modified_base 100: mod_base = OTHER; note = 2'-O-methyladenosine
  modified_base 101: mod_base = OTHER; note = 2'-O-methyladenosine
  modified_base 102: mod_base = cm
  modified_base 103: mod_base = OTHER; note = 2'-O-methyladenosine
  modified_base 104: mod_base = cm
  modified_base 105: mod_base = cm
  modified_base 106: mod_base = cm
  modified_base 107: mod_base = cm
  modified_base 108: mod_base = um
  modified_base 109: mod_base = um
  modified_base 110: mod_base = gm
  modified_base 119: mod_base = um
  modified_base 120: mod_base = OTHER; note = Phosphorothioate (PS) linkage
  modified_base 120: mod_base = um
  modified_base 121: mod_base = OTHER; note = Phosphorothioate (PS) linkage
  modified_base 121: mod_base = um
  modified_base 122: mod_base = OTHER; note = Phosphorothioate (PS) linkage
  modified_base 122: mod_base = um
  source 1..122: mol_type = other RNA

SEQ ID NO: 165 - RNA, 122 nt, synthetic construct; identical to SEQ ID NO: 37
  modified_base 1: mod_base = um
  modified_base 2: mod_base = OTHER; note = Phosphorothioate (PS) linkage
  modified_base 2: mod_base = um
  modified_base 3: mod_base = OTHER; note = Phosphorothioate (PS) linkage
  modified_base 3: mod_base = gm
  modified_base 4: mod_base = OTHER; note = Phosphorothioate (PS) linkage
  modified_base 29: mod_base = gm
  modified_base 30: mod_base = cm
  modified_base 31: mod_base = um
  modified_base 32: mod_base = OTHER; note = 2'-O-methyladenosine
  modified_base 33: mod_base = gm
  modified_base 34: mod_base = OTHER; note = 2'-O-methyladenosine
  modified_base 35: mod_base = OTHER; note = 2'-O-methyladenosine
  modified_base 36: mod_base = OTHER; note = 2'-O-methyladenosine
  modified_base 37: mod_base = um
  modified_base 38: mod_base = OTHER; note = 2'-O-methyladenosine
  modified_base 39: mod_base = gm
  modified_base 40: mod_base = cm
  modified_base 68: mod_base = OTHER; note = 2'-O-methyladenosine
  modified_base 69: mod_base = OTHER; note = 2'-O-methyladenosine
  modified_base 70: mod_base = cm
  modified_base 71: mod_base = um
  modified_base 72: mod_base = um
  modified_base 73: mod_base = gm
  modified_base 74: mod_base = OTHER; note = 2'-O-methyladenosine
  modified_base 75: mod_base = OTHER; note = 2'-O-methyladenosine
  modified_base 76: mod_base = OTHER; note = 2'-O-methyladenosine
  modified_base 77: mod_base = OTHER; note = 2'-O-methyladenosine
  modified_base 78: mod_base = OTHER; note = 2'-O-methyladenosine
  modified_base 79: mod_base = gm
  modified_base 80: mod_base = um
  modified_base 81: mod_base = gm
  modified_base 82: mod_base = gm
  modified_base 83: mod_base = cm
  modified_base 84: mod_base = OTHER; note = 2'-O-methyladenosine
  modified_base 85: mod_base = cm
  modified_base 86: mod_base = cm
  modified_base 87: mod_base = gm
  modified_base 88: mod_base = OTHER; note = 2'-O-methyladenosine
  modified_base 89: mod_base = gm
  modified_base 90: mod_base = um
  modified_base 91: mod_base = cm
  modified_base 92: mod_base = gm
  modified_base 93: mod_base = gm
  modified_base 94: mod_base = um
  modified_base 95: mod_base = gm
  modified_base 96: mod_base = cm
  modified_base 111: mod_base = gm
  modified_base 112: mod_base = gm
  modified_base 113: mod_base = cm
  modified_base 114: mod_base = gm
  modified_base 115: mod_base = um
  modified_base 116: mod_base = gm
  modified_base 117: mod_base = gm
  modified_base 118: mod_base = cm
  modified_base 119: mod_base = um
  modified_base 120: mod_base = OTHER; note = Phosphorothioate (PS) linkage
  modified_base 120: mod_base = um
  modified_base 121: mod_base = OTHER; note = Phosphorothioate (PS) linkage
  modified_base 121: mod_base = um
  modified_base 122: mod_base = OTHER; note = Phosphorothioate (PS) linkage
  modified_base 122: mod_base = um
  source 1..122: mol_type = other RNA

SEQ ID NO: 166 - RNA, 122 nt, synthetic construct; identical to SEQ ID NO: 37
  modified_base 1: mod_base = um
  modified_base 2: mod_base = OTHER; note = Phosphorothioate (PS) linkage
  modified_base 2: mod_base = um
  modified_base 3: mod_base = OTHER; note = Phosphorothioate (PS) linkage
  modified_base 3: mod_base = gm
  modified_base 4: mod_base = OTHER; note = Phosphorothioate (PS) linkage
  modified_base 29: mod_base = gm
  modified_base 30: mod_base = cm
  modified_base 31: mod_base = um
  modified_base 32: mod_base = OTHER; note = 2'-O-methyladenosine
  modified_base 33: mod_base = gm
  modified_base 34: mod_base = OTHER; note = 2'-O-methyladenosine
  modified_base 35: mod_base = OTHER; note = 2'-O-methyladenosine
  modified_base 36: mod_base = OTHER; note = 2'-O-methyladenosine
  modified_base 37: mod_base = um
  modified_base 38: mod_base = OTHER; note = 2'-O-methyladenosine
  modified_base 39: mod_base = gm
  modified_base 40: mod_base = cm
  modified_base 68: mod_base = OTHER; note = 2'-O-methyladenosine
  modified_base 69: mod_base = OTHER; note = 2'-O-methyladenosine
  modified_base 70: mod_base = cm
  modified_base 71: mod_base = um
  modified_base 72: mod_base = um
  modified_base 73: mod_base = gm
  modified_base 74: mod_base = OTHER; note = 2'-O-methyladenosine
  modified_base 75: mod_base = OTHER; note = 2'-O-methyladenosine
  modified_base 76: mod_base = OTHER; note = 2'-O-methyladenosine
  modified_base 77: mod_base = OTHER; note = 2'-O-methyladenosine
  modified_base 78: mod_base = OTHER; note = 2'-O-methyladenosine
  modified_base 79: mod_base = gm
  modified_base 80: mod_base = um
  modified_base 81: mod_base = gm
  modified_base 82: mod_base = gm
  modified_base 83: mod_base = cm
  modified_base 84: mod_base = OTHER; note = 2'-O-methyladenosine
  modified_base 85: mod_base = cm
  modified_base 86: mod_base = cm
  modified_base 87: mod_base = gm
  modified_base 88: mod_base = OTHER; note = 2'-O-methyladenosine
  modified_base 89: mod_base = gm
  modified_base 90: mod_base = um
  modified_base 91: mod_base = cm
  modified_base 92: mod_base = gm
  modified_base 93: mod_base = gm
  modified_base 94: mod_base = um
  modified_base 95: mod_base = gm
  modified_base 96: mod_base = cm
  modified_base 97: mod_base = gm
  modified_base 98: mod_base = um
  modified_base 99: mod_base = gm
  modified_base 100: mod_base = OTHER; note = 2'-O-methyladenosine
  modified_base 101: mod_base = OTHER; note = 2'-O-methyladenosine
  modified_base 102: mod_base = cm
  modified_base 103: mod_base = OTHER; note = 2'-O-methyladenosine
  modified_base 104: mod_base = cm
  modified_base 105: mod_base = cm
  modified_base 106: mod_base = cm
  modified_base 107: mod_base = cm
  modified_base 108: mod_base = um
  modified_base 109: mod_base = um
  modified_base 110: mod_base = gm
  modified_base 111: mod_base = gm
  modified_base 112: mod_base = gm
  modified_base 113: mod_base = cm
  modified_base 114: mod_base = gm
  modified_base 115: mod_base = um
  modified_base 116: mod_base = gm
  modified_base 117: mod_base = gm
  modified_base 118: mod_base = cm
  modified_base 119: mod_base = um
  modified_base 120: mod_base = OTHER; note = Phosphorothioate (PS) linkage
  modified_base 120: mod_base = um
  modified_base 121: mod_base = OTHER; note = Phosphorothioate (PS) linkage
  modified_base 121: mod_base = um
  modified_base 122: mod_base = OTHER; note = Phosphorothioate (PS) linkage
  modified_base 122: mod_base = um
  source 1..122: mol_type = other RNA

SEQ ID NO: 167 - RNA, 122 nt, synthetic construct; identical to SEQ ID NO: 37
  modified_base 1: mod_base = um
  modified_base 2: mod_base = OTHER; note = Phosphorothioate (PS) linkage
  modified_base 2: mod_base = um
  modified_base 3: mod_base = OTHER; note = Phosphorothioate (PS) linkage
  modified_base 3: mod_base = gm
  modified_base 4: mod_base = OTHER; note = Phosphorothioate (PS) linkage
  modified_base 29: mod_base = gm
  modified_base 30: mod_base = cm
  modified_base 31: mod_base = um
  modified_base 32: mod_base = OTHER; note = 2'-O-methyladenosine
  modified_base 33: mod_base = gm
  modified_base 34: mod_base = OTHER; note = 2'-O-methyladenosine
  modified_base 35: mod_base = OTHER; note = 2'-O-methyladenosine
  modified_base 36: mod_base = OTHER; note = 2'-O-methyladenosine
  modified_base 37: mod_base = um
  modified_base 38: mod_base = OTHER; note = 2'-O-methyladenosine
  modified_base 39: mod_base = gm
  modified_base 40: mod_base = cm
  modified_base 68: mod_base = OTHER; note = 2'-O-methyladenosine
  modified_base 69: mod_base = OTHER; note = 2'-O-methyladenosine
  modified_base 70: mod_base = cm
  modified_base 71: mod_base = um
  modified_base 72: mod_base = um
  modified_base 73: mod_base = gm
  modified_base 74: mod_base = OTHER; note = 2'-O-methyladenosine
  modified_base 75: mod_base = OTHER; note = 2'-O-methyladenosine
  modified_base 76: mod_base = OTHER; note = 2'-O-methyladenosine
  modified_base 77: mod_base = OTHER; note = 2'-O-methyladenosine
  modified_base 78: mod_base = OTHER; note = 2'-O-methyladenosine
  modified_base 79: mod_base = gm
  modified_base 80: mod_base = um
  modified_base 81: mod_base = gm
  modified_base 82: mod_base = gm
  modified_base 83: mod_base = cm
  modified_base 84: mod_base = OTHER; note = 2'-O-methyladenosine
  modified_base 85: mod_base = cm
  modified_base 86: mod_base = cm
  modified_base 87: mod_base = gm
  modified_base 88: mod_base = OTHER; note = 2'-O-methyladenosine
  modified_base 89: mod_base = gm
  modified_base 90: mod_base = um
  modified_base 91: mod_base = cm
  modified_base 92: mod_base = gm
  modified_base 93: mod_base = gm
  modified_base 94: mod_base = um
  modified_base 95: mod_base = gm
  modified_base 96: mod_base = cm
  modified_base 98: mod_base = um
  modified_base 100: mod_base = OTHER; note = 2'-O-methyladenosine
  modified_base 102: mod_base = cm
  modified_base 104: mod_base = cm
  modified_base 106: mod_base = cm
  modified_base 108: mod_base = um
  modified_base 110: mod_base = gm
  modified_base 119: mod_base = um
  modified_base 120: mod_base = OTHER; note = Phosphorothioate (PS) linkage
  modified_base 120: mod_base = um
  modified_base 121: mod_base = OTHER; note = Phosphorothioate (PS) linkage
  modified_base 121: mod_base = um
  modified_base 122: mod_base = OTHER; note = Phosphorothioate (PS) linkage
  modified_base 122: mod_base = um
  source 1..122: mol_type = other RNA

SEQ ID NO: 168 - RNA, 122 nt, synthetic construct; identical to SEQ ID NO: 37
  modified_base 1: mod_base = um
  modified_base 2: mod_base = OTHER; note = Phosphorothioate (PS) linkage
  modified_base 2: mod_base = um
  modified_base 3: mod_base = OTHER; note = Phosphorothioate (PS) linkage
  modified_base 3: mod_base = gm
  modified_base 4: mod_base = OTHER; note = Phosphorothioate (PS) linkage
  modified_base 29: mod_base = gm
  modified_base 30: mod_base = cm
  modified_base 31: mod_base = um
  modified_base 32: mod_base = OTHER; note = 2'-O-methyladenosine
  modified_base 33: mod_base = gm
  modified_base 34: mod_base = OTHER; note = 2'-O-methyladenosine
  modified_base 35: mod_base = OTHER; note = 2'-O-methyladenosine
  modified_base 36: mod_base = OTHER; note = 2'-O-methyladenosine
  modified_base 37: mod_base = um
  modified_base 38: mod_base = OTHER; note = 2'-O-methyladenosine
  modified_base 39: mod_base = gm
  modified_base 40: mod_base = cm
  modified_base 68: mod_base = OTHER; note = 2'-O-methyladenosine
  modified_base 69: mod_base = OTHER; note = 2'-O-methyladenosine
  modified_base 70: mod_base = cm
  modified_base 71: mod_base = um
  modified_base 72: mod_base = um
  modified_base 73: mod_base = gm
  modified_base 74: mod_base = OTHER; note = 2'-O-methyladenosine
  modified_base 75: mod_base = OTHER; note = 2'-O-methyladenosine
  modified_base 76: mod_base = OTHER; note = 2'-O-methyladenosine
  modified_base 77: mod_base = OTHER; note = 2'-O-methyladenosine
  modified_base 78: mod_base = OTHER; note = 2'-O-methyladenosine
  modified_base 79: mod_base = gm
  modified_base 80: mod_base = um
  modified_base 81: mod_base = gm
  modified_base 82: mod_base = gm
  modified_base 83: mod_base = cm
  modified_base 84: mod_base = OTHER; note = 2'-O-methyladenosine
  modified_base 85: mod_base = cm
  modified_base 86: mod_base = cm
  modified_base 87: mod_base = gm
  modified_base 88: mod_base = OTHER; note = 2'-O-methyladenosine
  modified_base 89: mod_base = gm
  modified_base 90: mod_base = um
  modified_base 91: mod_base = cm
  modified_base 92: mod_base = gm
  modified_base 93: mod_base = gm
  modified_base 94: mod_base = um
  modified_base 95: mod_base = gm
  modified_base 96: mod_base = cm
  modified_base 112: mod_base = gm
  modified_base 114: mod_base = gm
  modified_base 116: mod_base = gm
  modified_base 118: mod_base = cm
  modified_base 119: mod_base = um
  modified_base 120: mod_base = OTHER; note = Phosphorothioate (PS) linkage
  modified_base 120: mod_base = um
  modified_base 121: mod_base = OTHER; note = Phosphorothioate (PS) linkage
  modified_base 121: mod_base = um
  modified_base 122: mod_base = OTHER; note = Phosphorothioate (PS) linkage
  modified_base 122: mod_base = um
  source 1..122: mol_type = other RNA

SEQ ID NO: 169 - RNA, 122 nt, synthetic construct; identical to SEQ ID NO: 37
  modified_base 1: mod_base = um
  modified_base 2: mod_base = OTHER; note = Phosphorothioate (PS) linkage
  modified_base 2: mod_base = um
  modified_base 3: mod_base = OTHER; note = Phosphorothioate (PS) linkage
  modified_base 3: mod_base = gm
  modified_base 4: mod_base = OTHER; note = Phosphorothioate (PS) linkage
  modified_base 29: mod_base = gm
  modified_base 30: mod_base = cm
  modified_base 31: mod_base = um
  modified_base 32: mod_base = OTHER; note = 2'-O-methyladenosine
  modified_base 33: mod_base = gm
  modified_base 34: mod_base = OTHER; note = 2'-O-methyladenosine
  modified_base 35: mod_base = OTHER; note = 2'-O-methyladenosine
  modified_base 36: mod_base = OTHER; note = 2'-O-methyladenosine
  modified_base 37: mod_base = um
  modified_base 38: mod_base = OTHER; note = 2'-O-methyladenosine
  modified_base 39: mod_base = gm
  modified_base 40: mod_base = cm
  modified_base 68: mod_base = OTHER; note = 2'-O-methyladenosine
  modified_base 69: mod_base = OTHER; note = 2'-O-methyladenosine
  modified_base 70: mod_base = cm
  modified_base 71: mod_base = um
  modified_base 72: mod_base = um
  modified_base 73: mod_base = gm
  modified_base 74: mod_base = OTHER; note = 2'-O-methyladenosine
  modified_base 75: mod_base = OTHER; note = 2'-O-methyladenosine
  modified_base 76: mod_base = OTHER; note = 2'-O-methyladenosine
  modified_base 77: mod_base = OTHER; note = 2'-O-methyladenosine
  modified_base 78: mod_base = OTHER; note = 2'-O-methyladenosine
  modified_base 79: mod_base = gm
  modified_base 80: mod_base = um
  modified_base 81: mod_base = gm
  modified_base 82: mod_base = gm
  modified_base 83: mod_base = cm
  modified_base 84: mod_base = OTHER; note = 2'-O-methyladenosine
  modified_base 85: mod_base = cm
  modified_base 86: mod_base = cm
  modified_base 87: mod_base = gm
  modified_base 88: mod_base = OTHER; note = 2'-O-methyladenosine
  modified_base 89: mod_base = gm
  modified_base 90: mod_base = um
  modified_base 91: mod_base = cm
  modified_base 92: mod_base = gm
  modified_base 93: mod_base = gm
  modified_base 94: mod_base = um
  modified_base 95: mod_base = gm
  modified_base 96: mod_base = cm
  modified_base 98: mod_base = um
  modified_base 100: mod_base = OTHER; note = 2'-O-methyladenosine
  modified_base 102: mod_base = cm
  modified_base 104: mod_base = cm
  modified_base 106: mod_base = cm
  modified_base 108: mod_base = um
  modified_base 110: mod_base = gm
  modified_base 112: mod_base = gm
  modified_base 114: mod_base = gm
  modified_base 116: mod_base = gm
  modified_base 118: mod_base = cm
  modified_base 119: mod_base = um
  modified_base 120: mod_base = OTHER; note = Phosphorothioate (PS) linkage
  modified_base 120: mod_base = um
  modified_base 121: mod_base = OTHER; note = Phosphorothioate (PS) linkage
  modified_base 121: mod_base = um
  modified_base 122: mod_base = OTHER; note = Phosphorothioate (PS) linkage
  modified_base 122: mod_base = um
  source 1..122: mol_type = other RNA

SEQ ID NO: 170 - RNA, 122 nt, synthetic construct; identical to SEQ ID NO: 37
  modified_base 1: mod_base = um
  modified_base 2: mod_base = OTHER; note = Phosphorothioate (PS) linkage
  modified_base 2: mod_base = um
  modified_base 3: mod_base = OTHER; note = Phosphorothioate (PS) linkage
  modified_base 3: mod_base = gm
  modified_base 4: mod_base = OTHER; note = Phosphorothioate (PS) linkage
  modified_base 29: mod_base = gm
  modified_base 30: mod_base = cm
  modified_base 31: mod_base = um
  modified_base 32: mod_base = OTHER; note = 2'-O-methyladenosine
  modified_base 33: mod_base = gm
  modified_base 34: mod_base = OTHER; note = 2'-O-methyladenosine
  modified_base 35: mod_base = OTHER; note = 2'-O-methyladenosine
  modified_base 36: mod_base = OTHER; note = 2'-O-methyladenosine
  modified_base 37: mod_base = um
  modified_base 38: mod_base = OTHER; note = 2'-O-methyladenosine
  modified_base 39: mod_base = gm
  modified_base 40: mod_base = cm
  modified_base 68: mod_base = OTHER; note = 2'-O-methyladenosine
  modified_base 69: mod_base = OTHER; note = 2'-O-methyladenosine
  modified_base 70: mod_base = cm
  modified_base 71: mod_base = um
  modified_base 72: mod_base = um
  modified_base 73: mod_base = gm
  modified_base 74: mod_base = OTHER; note = 2'-O-methyladenosine
  modified_base 75: mod_base = OTHER; note = 2'-O-methyladenosine
  modified_base 76: mod_base = OTHER; note = 2'-O-methyladenosine
  modified_base 77: mod_base = OTHER; note = 2'-O-methyladenosine
  modified_base 78: mod_base = OTHER; note = 2'-O-methyladenosine
  modified_base 79: mod_base = gm
  modified_base 80: mod_base = um
  modified_base 81: mod_base = gm
  modified_base 82: mod_base = gm
  modified_base 83: mod_base = cm
  modified_base 84: mod_base = OTHER; note = 2'-O-methyladenosine
  modified_base 85: mod_base = cm
  modified_base 86: mod_base = cm
  modified_base 87: mod_base = gm
  modified_base 88: mod_base = OTHER; note = 2'-O-methyladenosine
  modified_base 89: mod_base = gm
  modified_base 90: mod_base = um
  modified_base 91: mod_base = cm
  modified_base 92: mod_base = gm
  modified_base 93: mod_base = gm
  modified_base 94: mod_base = um
  modified_base 95: mod_base = gm
  modified_base 96: mod_base = cm
  modified_base 99: mod_base = gm
  modified_base 102: mod_base = cm
  modified_base 105: mod_base = cm
  modified_base 108: mod_base = um
  modified_base 119: mod_base = um
  modified_base 120: mod_base = OTHER; note = Phosphorothioate (PS) linkage
  modified_base 120: mod_base = um
  modified_base 121: mod_base = OTHER; note = Phosphorothioate (PS) linkage
  modified_base 121: mod_base = um
  modified_base 122: mod_base = OTHER; note = Phosphorothioate (PS) linkage
  modified_base 122: mod_base = um
  source 1..122: mol_type = other RNA

SEQ ID NO: 171 - RNA, 122 nt, synthetic construct; identical to SEQ ID NO: 37
  modified_base 1: mod_base = um
  modified_base 2: mod_base = OTHER; note = Phosphorothioate (PS) linkage
  modified_base 2: mod_base = um
  modified_base 3: mod_base = OTHER; note = Phosphorothioate (PS) linkage
  modified_base 3: mod_base = gm
  modified_base 4: mod_base = OTHER; note = Phosphorothioate (PS) linkage
  modified_base 29: mod_base = gm
  modified_base 30: mod_base = cm
  modified_base 31: mod_base = um
  modified_base 32: mod_base = OTHER; note = 2'-O-methyladenosine
  modified_base 33: mod_base = gm
  modified_base 34: mod_base = OTHER; note = 2'-O-methyladenosine
  modified_base 35: mod_base = OTHER; note = 2'-O-methyladenosine
  modified_base 36: mod_base = OTHER; note = 2'-O-methyladenosine
  modified_base 37: mod_base = um
  modified_base 38: mod_base = OTHER; note = 2'-O-methyladenosine
  modified_base 39: mod_base = gm
  modified_base 40: mod_base = cm
  modified_base 68: mod_base = OTHER; note = 2'-O-methyladenosine
  modified_base 69: mod_base = OTHER; note = 2'-O-methyladenosine
  modified_base 70: mod_base = cm
  modified_base 71: mod_base = um
  modified_base 72: mod_base = um
  modified_base 73: mod_base = gm
  modified_base 74: mod_base = OTHER; note = 2'-O-methyladenosine
  modified_base 75: mod_base = OTHER; note = 2'-O-methyladenosine
  modified_base 76: mod_base = OTHER; note = 2'-O-methyladenosine
  modified_base 77: mod_base = OTHER; note = 2'-O-methyladenosine
  modified_base 78: mod_base = OTHER; note = 2'-O-methyladenosine
  modified_base 79: mod_base = gm
  modified_base 80: mod_base = um
  modified_base 81: mod_base = gm
  modified_base 82: mod_base = gm
  modified_base 83: mod_base = cm
  modified_base 84: mod_base = OTHER; note = 2'-O-methyladenosine
  modified_base 85: mod_base = cm
  modified_base 86: mod_base = cm
  modified_base 87: mod_base = gm
  modified_base 88: mod_base = OTHER; note = 2'-O-methyladenosine
  modified_base 89: mod_base = gm
  modified_base 90: mod_base = um
  modified_base 91: mod_base = cm
  modified_base 92: mod_base = gm
  modified_base 93: mod_base = gm
  modified_base 94: mod_base = um
  modified_base 95: mod_base = gm
  modified_base 96: mod_base = cm
  modified_base 111: mod_base = gm
  modified_base 114: mod_base = gm
  modified_base 117: mod_base = gm
  modified_base 119: mod_base = um
  modified_base 120: mod_base = OTHER; note = Phosphorothioate (PS) linkage
  modified_base 120: mod_base = um
  modified_base 121: mod_base = OTHER; note = Phosphorothioate (PS) linkage
  modified_base 121: mod_base = um
  modified_base 122: mod_base = OTHER; note = Phosphorothioate (PS) linkage
  modified_base 122: mod_base = um
  source 1..122: mol_type = other RNA

SEQ ID NO: 172 - RNA, 122 nt, synthetic construct; identical to SEQ ID NO: 37
  modified_base 1: mod_base = um
  modified_base 2: mod_base = OTHER; note = Phosphorothioate (PS) linkage
  modified_base 2: mod_base = um
  modified_base 3: mod_base = OTHER; note = Phosphorothioate (PS) linkage
  modified_base 3: mod_base = gm
  modified_base 4: mod_base = OTHER; note = Phosphorothioate (PS) linkage
  modified_base 29: mod_base = gm
  modified_base 30: mod_base = cm
  modified_base 31: mod_base = um
  modified_base 32: mod_base = OTHER; note = 2'-O-methyladenosine
  modified_base 33: mod_base = gm
  modified_base 34: mod_base = OTHER; note = 2'-O-methyladenosine
  modified_base 35: mod_base = OTHER; note = 2'-O-methyladenosine
  modified_base 36: mod_base = OTHER; note = 2'-O-methyladenosine
  modified_base 37: mod_base = um
  modified_base 38: mod_base = OTHER; note = 2'-O-methyladenosine
  modified_base 39: mod_base = gm
  modified_base 40: mod_base = cm
  modified_base 68: mod_base = OTHER; note = 2'-O-methyladenosine
  modified_base 69: mod_base = OTHER; note = 2'-O-methyladenosine
  modified_base 70: mod_base = cm
  modified_base 71: mod_base = um
  modified_base 72: mod_base = um
  modified_base 73: mod_base = gm
  modified_base 74: mod_base = OTHER; note = 2'-O-methyladenosine
  modified_base 75: mod_base = OTHER; note = 2'-O-methyladenosine
  modified_base 76: mod_base = OTHER; note = 2'-O-methyladenosine
  modified_base 77: mod_base = OTHER; note = 2'-O-methyladenosine
  modified_base 78: mod_base = OTHER; note = 2'-O-methyladenosine
  modified_base 79: mod_base = gm
  modified_base 80: mod_base = um
  modified_base 81: mod_base = gm
  modified_base 82: mod_base = gm
  modified_base 83: mod_base = cm
  modified_base 84: mod_base = OTHER; note = 2'-O-methyladenosine
  modified_base 85: mod_base = cm
  modified_base 86: mod_base = cm
  modified_base 87: mod_base = gm
  modified_base 88: mod_base = OTHER; note = 2'-O-methyladenosine
  modified_base 89: mod_base = gm
  modified_base 90: mod_base = um
  modified_base 91: mod_base = cm
  modified_base 92: mod_base = gm
  modified_base 93: mod_base = gm
  modified_base 94: mod_base = um
  modified_base 95: mod_base = gm
  modified_base 96: mod_base = cm
  modified_base 99: mod_base = gm
  modified_base 102: mod_base = cm
  modified_base 105: mod_base = cm
  modified_base 108: mod_base = um
  modified_base 111: mod_base = gm
  modified_base 114: mod_base = gm
  modified_base 117: mod_base = gm
  modified_base 119: mod_base = um
  modified_base 120: mod_base = OTHER; note = Phosphorothioate (PS) linkage
  modified_base 120: mod_base = um
  modified_base 121: mod_base = OTHER; note = Phosphorothioate (PS) linkage
  modified_base 121: mod_base = um
  modified_base 122: mod_base = OTHER; note = Phosphorothioate (PS) linkage
  modified_base 122: mod_base = um
  source 1..122: mol_type = other RNA

SEQ ID NO: 173 - RNA, 122 nt, synthetic construct; identical to SEQ ID NO: 37
  modified_base 1: mod_base = um
  modified_base 2: mod_base = OTHER; note = Phosphorothioate (PS) linkage
  modified_base 2: mod_base = um
  modified_base 3: mod_base = OTHER; note = Phosphorothioate (PS) linkage
  modified_base 3: mod_base = gm
  modified_base 4: mod_base = OTHER; note = Phosphorothioate (PS) linkage
  modified_base 29: mod_base = gm
  modified_base 30: mod_base = cm
  modified_base 31: mod_base = um
  modified_base 32: mod_base = OTHER; note = 2'-O-methyladenosine
  modified_base 33: mod_base = gm
  modified_base 34: mod_base = OTHER; note = 2'-O-methyladenosine
  modified_base 35: mod_base = OTHER; note = 2'-O-methyladenosine
  modified_base 36: mod_base = OTHER; note = 2'-O-methyladenosine
  modified_base 37: mod_base = um
  modified_base 38: mod_base = OTHER; note = 2'-O-methyladenosine
  modified_base 39: mod_base = gm
  modified_base 40: mod_base = cm
  modified_base 68: mod_base = OTHER; note = 2'-O-methyladenosine
  modified_base 69: mod_base = OTHER; note = 2'-O-methyladenosine
  modified_base 70: mod_base = cm
  modified_base 71: mod_base = um
  modified_base 72: mod_base = um
  modified_base 73: mod_base = gm
  modified_base 74: mod_base = OTHER; note = 2'-O-methyladenosine
  modified_base 75: mod_base = OTHER; note = 2'-O-methyladenosine
  modified_base 76: mod_base = OTHER; note = 2'-O-methyladenosine
  modified_base 77: mod_base = OTHER; note = 2'-O-methyladenosine
  modified_base 78: mod_base = OTHER; note = 2'-O-methyladenosine
  modified_base 79: mod_base = gm
  modified_base 80: mod_base = um
  modified_base 81: mod_base = gm
  modified_base 82: mod_base = gm
  modified_base 83: mod_base = cm
  modified_base 84: mod_base = OTHER; note = 2'-O-methyladenosine
  modified_base 85: mod_base = cm
  modified_base 86: mod_base = cm
  modified_base 87: mod_base = gm
  modified_base 88: mod_base = OTHER; note = 2'-O-methyladenosine
  modified_base 89: mod_base = gm
  modified_base 90: mod_base = um
  modified_base 91: mod_base = cm
  modified_base 92: mod_base = gm
  modified_base 93: mod_base = gm
  modified_base 94: mod_base = um
  modified_base 95: mod_base = gm
  modified_base 96: mod_base = cm
  modified_base 97: mod_base = OTHER; note = 2' fluoro modified base
  modified_base 98: mod_base = OTHER; note = 2' fluoro modified base
  modified_base 99: mod_base = OTHER; note = 2' fluoro modified base
  modified_base 100: mod_base = OTHER; note = 2' fluoro modified base
  modified_base 101: mod_base = OTHER; note = 2' fluoro modified base
  modified_base 102: mod_base = OTHER; note = 2' fluoro modified base
  modified_base 103: mod_base = OTHER; note = 2' fluoro modified base
  modified_base 104: mod_base = OTHER; note = 2' fluoro modified base
  modified_base 105: mod_base = OTHER; note = 2' fluoro modified base
  modified_base 106: mod_base = OTHER; note = 2' fluoro modified base
  modified_base 107: mod_base = OTHER; note = 2' fluoro modified base
  modified_base 108: mod_base = OTHER; note = 2' fluoro modified base
  modified_base 109: mod_base = OTHER; note = 2' fluoro modified base
  modified_base 110: mod_base = OTHER; note = 2' fluoro modified base
  modified_base 119: mod_base = um
  modified_base 120: mod_base = OTHER; note = Phosphorothioate (PS) linkage
  modified_base 120: mod_base = um
  modified_base 121: mod_base = OTHER; note = Phosphorothioate (PS) linkage
  modified_base 121: mod_base = um
  modified_base 122: mod_base = OTHER; note = Phosphorothioate (PS) linkage
  modified_base 122: mod_base = um
  source 1..122: mol_type = other RNA

SEQ ID NO: 174 - RNA, 122 nt, synthetic construct; identical to SEQ ID NO: 37
  modified_base 1: mod_base = um
  modified_base 2: mod_base = OTHER; note = Phosphorothioate (PS) linkage
  modified_base 2: mod_base = um
  modified_base 3: mod_base = OTHER; note = Phosphorothioate (PS) linkage
  modified_base 3: mod_base = gm
  modified_base 4: mod_base = OTHER; note = Phosphorothioate (PS) linkage
  modified_base 29: mod_base = gm
  modified_base 30: mod_base = cm
  modified_base 31: mod_base = um
  modified_base 32: mod_base = OTHER; note = 2'-O-methyladenosine
  modified_base 33: mod_base = gm
  modified_base 34: mod_base = OTHER; note = 2'-O-methyladenosine
  modified_base 35: mod_base = OTHER; note = 2'-O-methyladenosine
  modified_base 36: mod_base = OTHER; note = 2'-O-methyladenosine
  modified_base 37: mod_base = um
  modified_base 38: mod_base = OTHER; note = 2'-O-methyladenosine
  modified_base 39: mod_base = gm
  modified_base 40: mod_base = cm
  modified_base 68: mod_base = OTHER; note = 2'-O-methyladenosine
  modified_base 69: mod_base = OTHER; note = 2'-O-methyladenosine
  modified_base 70: mod_base = cm
  modified_base 71: mod_base = um
  modified_base 72: mod_base = um
  modified_base 73: mod_base = gm
  modified_base 74: mod_base = OTHER; note = 2'-O-methyladenosine
  modified_base 75: mod_base = OTHER; note = 2'-O-methyladenosine
  modified_base 76: mod_base = OTHER; note = 2'-O-methyladenosine
  modified_base 77: mod_base = OTHER; note = 2'-O-methyladenosine
  modified_base 78: mod_base = OTHER; note = 2'-O-methyladenosine
  modified_base 79: mod_base = gm
  modified_base 80: mod_base = um
  modified_base 81: mod_base = gm
  modified_base 82: mod_base = gm
  modified_base 83: mod_base = cm
  modified_base 84: mod_base = OTHER; note = 2'-O-methyladenosine
  modified_base 85: mod_base = cm
  modified_base 86: mod_base = cm
  modified_base 87: mod_base = gm
  modified_base 88: mod_base = OTHER; note = 2'-O-methyladenosine
  modified_base 89: mod_base = gm
  modified_base 90: mod_base = um
  modified_base 91: mod_base = cm
  modified_base 92: mod_base = gm
  modified_base 93: mod_base = gm
  modified_base 94: mod_base = um
  modified_base 95: mod_base = gm
  modified_base 96: mod_base = cm
  modified_base 111: mod_base = OTHER; note = 2' fluoro modified base
  modified_base 112: mod_base = OTHER; note = 2' fluoro modified base
  modified_base 113: mod_base = OTHER; note = 2' fluoro modified base
  modified_base 114: mod_base = OTHER; note = 2' fluoro modified base
  modified_base 115: mod_base = OTHER; note = 2' fluoro modified base
  modified_base 116: mod_base = OTHER; note = 2' fluoro modified base
  modified_base 117: mod_base = OTHER; note = 2' fluoro modified base
  modified_base 118: mod_base = OTHER; note = 2' fluoro modified base
  modified_base 119: mod_base = um
  modified_base 120: mod_base = OTHER; note = Phosphorothioate (PS) linkage
  modified_base 120: mod_base = um
  modified_base 121: mod_base = OTHER; note = Phosphorothioate (PS) linkage
  modified_base 121: mod_base = um
  modified_base 122: mod_base = OTHER; note = Phosphorothioate (PS) linkage
  modified_base 122: mod_base = um
  source 1..122: mol_type = other RNA

SEQ ID NO: 175 - RNA, 122 nt, synthetic construct; identical to SEQ ID NO: 37
  modified_base 1: mod_base = um
  modified_base 2: mod_base = OTHER; note = Phosphorothioate (PS) linkage
  modified_base 2: mod_base = um
  modified_base 3: mod_base = OTHER; note = Phosphorothioate (PS) linkage
  modified_base 3: mod_base = gm
  modified_base 4: mod_base = OTHER; note = Phosphorothioate (PS) linkage
  modified_base 29: mod_base = gm
  modified_base 30: mod_base = cm
  modified_base 31: mod_base = um
  modified_base 32: mod_base = OTHER; note = 2'-O-methyladenosine
  modified_base 33: mod_base = gm
  modified_base 34: mod_base = OTHER; note = 2'-O-methyladenosine
  modified_base 35: mod_base = OTHER; note = 2'-O-methyladenosine
  modified_base 36: mod_base = OTHER; note = 2'-O-methyladenosine
  modified_base 37: mod_base = um
  modified_base 38: mod_base = OTHER; note = 2'-O-methyladenosine
  modified_base 39: mod_base = gm
  modified_base 40: mod_base = cm
  modified_base 68: mod_base = OTHER; note = 2'-O-methyladenosine
  modified_base 69: mod_base = OTHER; note = 2'-O-methyladenosine
  modified_base 70: mod_base = cm
  modified_base 71: mod_base = um
  modified_base 72: mod_base = um
  modified_base 73: mod_base = gm
  modified_base 74: mod_base = OTHER; note = 2'-O-methyladenosine
  modified_base 75: mod_base = OTHER; note = 2'-O-methyladenosine
  modified_base 76: mod_base = OTHER; note = 2'-O-methyladenosine
  modified_base 77: mod_base = OTHER; note = 2'-O-methyladenosine
  modified_base 78: mod_base = OTHER; note = 2'-O-methyladenosine
  modified_base 79: mod_base = gm
  modified_base 80: mod_base = um
  modified_base 81: mod_base = gm
  modified_base 82: mod_base = gm
  modified_base 83: mod_base = cm
  modified_base 84: mod_base = OTHER; note = 2'-O-methyladenosine
  modified_base 85: mod_base = cm
  modified_base 86: mod_base = cm
  modified_base 87: mod_base = gm
  modified_base 88: mod_base = OTHER; note = 2'-O-methyladenosine
  modified_base 89: mod_base = gm
  modified_base 90: mod_base = um
  modified_base 91: mod_base = cm
  modified_base 92: mod_base = gm
  modified_base 93: mod_base = gm
  modified_base 94: mod_base = um
  modified_base 95: mod_base = gm
  modified_base 96: mod_base = cm
  modified_base 97: mod_base = OTHER; note = 2' fluoro modified base
  modified_base 98: mod_base = OTHER; note = 2' fluoro modified base
  modified_base 99: mod_base = OTHER; note = 2' fluoro modified base
  modified_base 100: mod_base = OTHER; note = 2' fluoro modified base
  modified_base 101: mod_base = OTHER; note = 2' fluoro modified base
  modified_base 102: mod_base = OTHER; note = 2' fluoro modified base
  modified_base 103: mod_base = OTHER; note = 2' fluoro modified base
  modified_base 104: mod_base = OTHER; note = 2' fluoro modified base
  modified_base 105: mod_base = OTHER; note = 2' fluoro modified base
  modified_base 106: mod_base = OTHER; note = 2' fluoro modified base
  modified_base 107: mod_base = OTHER; note = 2' fluoro modified base
  modified_base 108: mod_base = OTHER; note = 2' fluoro modified base
  modified_base 109: mod_base = OTHER; note = 2' fluoro modified base
  modified_base 110: mod_base = OTHER; note = 2' fluoro modified base
  modified_base 111: mod_base = OTHER; note = 2' fluoro modified base
  modified_base 112: mod_base = OTHER; note = 2' fluoro modified base
  modified_base 113: mod_base = OTHER; note = 2' fluoro modified base
  modified_base 114: mod_base = OTHER; note = 2' fluoro modified base
  modified_base 115: mod_base = OTHER; note = 2' fluoro modified base
  modified_base 116: mod_base = OTHER; note = 2' fluoro modified base
  modified_base 117: mod_base = OTHER; note = 2' fluoro modified base
  modified_base 118: mod_base = OTHER; note = 2' fluoro modified base
  modified_base 119: mod_base = um
  modified_base 120: mod_base = OTHER; note = Phosphorothioate (PS) linkage
  modified_base 120: mod_base = um
  modified_base 121: mod_base = OTHER; note = Phosphorothioate (PS) linkage
  modified_base 121: mod_base = um
  modified_base 122: mod_base = OTHER; note = Phosphorothioate (PS) linkage
  modified_base 122: mod_base = um
  source 1..122: mol_type = other RNA

SEQ ID NO: 176 - RNA, 122 nt, synthetic construct; identical to SEQ ID NO: 37
  modified_base 1: mod_base = um
  modified_base 2: mod_base = OTHER; note = Phosphorothioate (PS) linkage
  modified_base 2: mod_base = um
  modified_base 3: mod_base = OTHER; note = Phosphorothioate (PS) linkage
  modified_base 3: mod_base = gm
  modified_base 4: mod_base = OTHER; note = Phosphorothioate (PS) linkage
  modified_base 29: mod_base = gm
  modified_base 30: mod_base = cm
  modified_base 31: mod_base = um
  modified_base 32: mod_base = OTHER; note = 2'-O-methyladenosine
  modified_base 33: mod_base = gm
  modified_base 34: mod_base = OTHER; note = 2'-O-methyladenosine
  modified_base 35: mod_base = OTHER; note = 2'-O-methyladenosine
  modified_base 36: mod_base = OTHER; note = 2'-O-methyladenosine
  modified_base 37: mod_base = um
  modified_base 38: mod_base = OTHER; note = 2'-O-methyladenosine
  modified_base 39: mod_base = gm
  modified_base 40: mod_base = cm
  modified_base 68: mod_base = OTHER; note = 2'-O-methyladenosine
  modified_base 69: mod_base = OTHER; note = 2'-O-methyladenosine
  modified_base 70: mod_base = cm
  modified_base 71: mod_base = um
  modified_base 72: mod_base = um
  modified_base 73: mod_base = gm
  modified_base 74: mod_base = OTHER; note = 2'-O-methyladenosine
  modified_base 75: mod_base = OTHER; note = 2'-O-methyladenosine
  modified_base 76: mod_base = OTHER; note = 2'-O-methyladenosine
  modified_base 77: mod_base = OTHER; note = 2'-O-methyladenosine
  modified_base 78: mod_base = OTHER; note = 2'-O-methyladenosine
  modified_base 79: mod_base = gm
  modified_base 80: mod_base = um
  modified_base 81: mod_base = gm
  modified_base 82: mod_base = gm
  modified_base 83: mod_base = cm
  modified_base 84: mod_base = OTHER; note = 2'-O-methyladenosine
  modified_base 85: mod_base = cm
  modified_base 86: mod_base = cm
  modified_base 87: mod_base = gm
  modified_base 88: mod_base = OTHER; note = 2'-O-methyladenosine
  modified_base 89: mod_base = gm
  modified_base 90: mod_base = um
  modified_base 91: mod_base = cm
  modified_base 92: mod_base = gm
  modified_base 93: mod_base = gm
  modified_base 94: mod_base = um
  modified_base 95: mod_base = gm
  modified_base 96: mod_base = cm
  modified_base 98: mod_base = OTHER; note = 2' fluoro modified base
  modified_base 100: mod_base = OTHER; note = 2' fluoro modified base
  modified_base 102: mod_base = OTHER; note = 2' fluoro modified base
  modified_base 104: mod_base = OTHER; note = 2' fluoro modified base
  modified_base 106: mod_base = OTHER; note = 2' fluoro modified base
  modified_base 108: mod_base = OTHER; note = 2' fluoro modified base
  modified_base 110: mod_base = OTHER; note = 2' fluoro modified base
  modified_base 119: mod_base = um
  modified_base 120: mod_base = OTHER; note = Phosphorothioate (PS) linkage
  modified_base 120: mod_base = um
  modified_base 121: mod_base = OTHER; note = Phosphorothioate (PS) linkage
  modified_base 121: mod_base = um
  modified_base 122: mod_base = OTHER; note = Phosphorothioate (PS) linkage
  modified_base 122: mod_base = um
  source 1..122: mol_type = other RNA

SEQ ID NO: 177 - RNA, 122 nt, synthetic construct; identical to SEQ ID NO: 37
  modified_base 1: mod_base = um
  modified_base 2: mod_base = OTHER; note = Phosphorothioate (PS) linkage
  modified_base 2: mod_base = um
  modified_base 3: mod_base = OTHER; note = Phosphorothioate (PS) linkage
  modified_base 3: mod_base = gm
  modified_base 4: mod_base = OTHER; note = Phosphorothioate (PS) linkage
  modified_base 29: mod_base = gm
  modified_base 30: mod_base = cm
  modified_base 31: mod_base = um
  modified_base 32: mod_base = OTHER; note = 2'-O-methyladenosine
  modified_base 33: mod_base = gm
  modified_base 34: mod_base = OTHER; note = 2'-O-methyladenosine
  modified_base 35: mod_base = OTHER; note = 2'-O-methyladenosine
  modified_base 36: mod_base = OTHER; note = 2'-O-methyladenosine
  modified_base 37: mod_base = um
  modified_base 38: mod_base = OTHER; note = 2'-O-methyladenosine
  modified_base 39: mod_base = gm
  modified_base 40: mod_base = cm
  modified_base 68: mod_base = OTHER; note = 2'-O-methyladenosine
  modified_base 69: mod_base = OTHER; note = 2'-O-methyladenosine
  modified_base 70: mod_base = cm
  modified_base 71: mod_base = um
  modified_base 72: mod_base = um
  modified_base 73: mod_base = gm
  modified_base 74: mod_base = OTHER; note = 2'-O-methyladenosine
  modified_base 75: mod_base = OTHER; note = 2'-O-methyladenosine
  modified_base 76: mod_base = OTHER; note = 2'-O-methyladenosine
  modified_base 77: mod_base = OTHER; note = 2'-O-methyladenosine
  modified_base 78: mod_base = OTHER; note = 2'-O-methyladenosine
  modified_base 79: mod_base = gm
  modified_base 80: mod_base = um
  modified_base 81: mod_base = gm
  modified_base 82: mod_base = gm
  modified_base 83: mod_base = cm
  modified_base 84: mod_base = OTHER; note = 2'-O-methyladenosine
  modified_base 85: mod_base = cm
  modified_base 86: mod_base = cm
  modified_base 87: mod_base = gm
  modified_base 88: mod_base = OTHER; note = 2'-O-methyladenosine
  modified_base 89: mod_base = gm
  modified_base 90: mod_base = um
  modified_base 91: mod_base = cm
  modified_base 92: mod_base = gm
  modified_base 93: mod_base = gm
  modified_base 94: mod_base = um
  modified_base 95: mod_base = gm
  modified_base 96: mod_base = cm
  modified_base 112: mod_base = OTHER; note = 2' fluoro modified base
  modified_base 114: mod_base = OTHER; note = 2' fluoro modified base
  modified_base 116: mod_base = OTHER; note = 2' fluoro modified base
  modified_base 118: mod_base = OTHER; note = 2' fluoro modified base
  modified_base 119: mod_base = um
  modified_base 120: mod_base = OTHER; note = Phosphorothioate (PS) linkage
  modified_base 120: mod_base = um
  modified_base 121: mod_base = OTHER; note = Phosphorothioate (PS) linkage
  modified_base 121: mod_base = um
  modified_base 122: mod_base = OTHER; note = Phosphorothioate (PS) linkage
  modified_base 122: mod_base = um
  source 1..122: mol_type = other RNA

SEQ ID NO: 178 - RNA, 122 nt, synthetic construct; identical to SEQ ID NO: 37
  modified_base 1: mod_base = um
  modified_base 2: mod_base = OTHER; note = Phosphorothioate (PS) linkage
  modified_base 2: mod_base = um
  modified_base 3: mod_base = OTHER; note = Phosphorothioate (PS) linkage
  modified_base 3: mod_base = gm
  modified_base 4: mod_base = OTHER; note = Phosphorothioate (PS) linkage
  modified_base 29: mod_base = gm
  modified_base 30: mod_base = cm
  modified_base 31: mod_base = um
  modified_base 32: mod_base = OTHER; note = 2'-O-methyladenosine
  modified_base 33: mod_base = gm
  modified_base 34: mod_base = OTHER; note = 2'-O-methyladenosine
  modified_base 35: mod_base = OTHER; note = 2'-O-methyladenosine
  modified_base 36: mod_base = OTHER; note = 2'-O-methyladenosine
  modified_base 37: mod_base = um
  modified_base 38: mod_base = OTHER; note = 2'-O-methyladenosine
  modified_base 39: mod_base = gm
  modified_base 40: mod_base = cm
  modified_base 68: mod_base = OTHER; note = 2'-O-methyladenosine
  modified_base 69: mod_base = OTHER; note = 2'-O-methyladenosine
  modified_base 70: mod_base = cm
  modified_base 71: mod_base = um
  modified_base 72: mod_base = um
  modified_base 73: mod_base = gm
  modified_base 74: mod_base = OTHER; note = 2'-O-methyladenosine
  modified_base 75: mod_base = OTHER; note = 2'-O-methyladenosine
  modified_base 76: mod_base = OTHER; note = 2'-O-methyladenosine
  modified_base 77: mod_base = OTHER; note = 2'-O-methyladenosine
  modified_base 78: mod_base = OTHER; note = 2'-O-methyladenosine
  modified_base 79: mod_base = gm
  modified_base 80: mod_base = um
  modified_base 81: mod_base = gm
  modified_base 82: mod_base = gm
  modified_base 83: mod_base = cm
  modified_base 84: mod_base = OTHER; note = 2'-O-methyladenosine
  modified_base 85: mod_base = cm
  modified_base 86: mod_base = cm
  modified_base 87: mod_base = gm
  modified_base 88: mod_base = OTHER; note = 2'-O-methyladenosine
  modified_base 89: mod_base = gm
  modified_base 90: mod_base = um
  modified_base 91: mod_base = cm
  modified_base 92: mod_base = gm
  modified_base 93: mod_base = gm
  modified_base 94: mod_base = um
  modified_base 95: mod_base = gm
  modified_base 96: mod_base = cm
  modified_base 98: mod_base = OTHER; note = 2' fluoro modified base
  modified_base 100: mod_base = OTHER; note = 2' fluoro modified base
  modified_base 102: mod_base = OTHER; note = 2' fluoro modified base
  modified_base 104: mod_base = OTHER; note = 2' fluoro modified base
  modified_base 106: mod_base = OTHER; note = 2' fluoro modified base
  modified_base 108: mod_base = OTHER; note = 2' fluoro modified base
  modified_base 110: mod_base = OTHER; note = 2' fluoro modified base
  modified_base 112: mod_base = OTHER; note = 2' fluoro modified base
  modified_base 114: mod_base = OTHER; note = 2' fluoro modified base
  modified_base 116: mod_base = OTHER; note = 2' fluoro modified base
  modified_base 118: mod_base = OTHER; note = 2' fluoro modified base
  modified_base 119: mod_base = um
  modified_base 120: mod_base = OTHER; note = Phosphorothioate (PS) linkage
  modified_base 120: mod_base = um
  modified_base 121: mod_base = OTHER; note = Phosphorothioate (PS) linkage
  modified_base 121: mod_base = um
  modified_base 122: mod_base = OTHER; note = Phosphorothioate (PS) linkage
  modified_base 122: mod_base = um
  source 1..122: mol_type = other RNA

SEQ ID NO: 179 - RNA, 122 nt, synthetic construct; identical to SEQ ID NO: 37
  modified_base 1: mod_base = um
  modified_base 2: mod_base = OTHER; note = Phosphorothioate (PS) linkage
  modified_base 2: mod_base = um
  modified_base 3: mod_base = OTHER; note = Phosphorothioate (PS) linkage
  modified_base 3: mod_base = gm
  modified_base 4: mod_base = OTHER; note = Phosphorothioate (PS) linkage
  modified_base 29: mod_base = gm
  modified_base 30: mod_base = cm
  modified_base 31: mod_base = um
  modified_base 32: mod_base = OTHER; note = 2'-O-methyladenosine
  modified_base 33: mod_base = gm
  modified_base 34: mod_base = OTHER; note = 2'-O-methyladenosine
  modified_base 35: mod_base = OTHER; note = 2'-O-methyladenosine
  modified_base 36: mod_base = OTHER; note = 2'-O-methyladenosine
  modified_base 37: mod_base = um
  modified_base 38: mod_base = OTHER; note = 2'-O-methyladenosine
  modified_base 39: mod_base = gm
  modified_base 40: mod_base = cm
  modified_base 68: mod_base = OTHER; note = 2'-O-methyladenosine
  modified_base 69: mod_base = OTHER; note = 2'-O-methyladenosine
  modified_base 70: mod_base = cm
  modified_base 71: mod_base = um
  modified_base 72: mod_base = um
  modified_base 73: mod_base = gm
  modified_base 74: mod_base = OTHER; note = 2'-O-methyladenosine
  modified_base 75: mod_base = OTHER; note = 2'-O-methyladenosine
  modified_base 76: mod_base = OTHER; note = 2'-O-methyladenosine
  modified_base 77: mod_base = OTHER; note = 2'-O-methyladenosine
  modified_base 78: mod_base = OTHER; note = 2'-O-methyladenosine
  modified_base 79: mod_base = gm
  modified_base 80: mod_base = um
  modified_base 81: mod_base = gm
  modified_base 82: mod_base = gm
  modified_base 83: mod_base = cm
  modified_base 84: mod_base = OTHER; note = 2'-O-methyladenosine
  modified_base 85: mod_base = cm
  modified_base 86: mod_base = cm
  modified_base 87: mod_base = gm
  modified_base 88: mod_base = OTHER; note = 2'-O-methyladenosine
  modified_base 89: mod_base = gm
  modified_base 90: mod_base = um
  modified_base 91: mod_base = cm
  modified_base 92: mod_base = gm
  modified_base 93: mod_base = gm
  modified_base 94: mod_base = um
  modified_base 95: mod_base = gm
  modified_base 96: mod_base = cm
  modified_base 99: mod_base = OTHER; note = 2' fluoro modified base
  modified_base 102: mod_base = OTHER; note = 2' fluoro modified base
  modified_base 105: mod_base = OTHER; note = 2' fluoro modified base
  modified_base 108: mod_base = OTHER; note = 2' fluoro modified base
  modified_base 119: mod_base = um
  modified_base 120: mod_base = OTHER; note = Phosphorothioate (PS) linkage
  modified_base 120: mod_base = um
  modified_base 121: mod_base = OTHER; note = Phosphorothioate (PS) linkage
  modified_base 121: mod_base = um
  modified_base 122: mod_base = OTHER; note = Phosphorothioate (PS) linkage
  modified_base 122: mod_base = um
  source 1..122: mol_type = other RNA

SEQ ID NO: 180 - RNA, 122 nt, synthetic construct; identical to SEQ ID NO: 37
  modified_base 1: mod_base = um
  modified_base 2: mod_base = OTHER; note = Phosphorothioate (PS) linkage
  modified_base 2: mod_base = um
  modified_base 3: mod_base = OTHER; note = Phosphorothioate (PS) linkage
  modified_base 3: mod_base = gm
  modified_base 4: mod_base = OTHER; note = Phosphorothioate (PS) linkage
  modified_base 29: mod_base = gm
  modified_base 30: mod_base = cm
  modified_base 31: mod_base = um
  modified_base 32: mod_base = OTHER; note = 2'-O-methyladenosine
  modified_base 33: mod_base = gm
  modified_base 34: mod_base = OTHER; note = 2'-O-methyladenosine
  modified_base 35: mod_base = OTHER; note = 2'-O-methyladenosine
  modified_base 36: mod_base = OTHER; note = 2'-O-methyladenosine
  modified_base 37: mod_base = um
  modified_base 38: mod_base = OTHER; note = 2'-O-methyladenosine
  modified_base 39: mod_base = gm
  modified_base 40: mod_base = cm
  modified_base 68: mod_base = OTHER; note = 2'-O-methyladenosine
  modified_base 69: mod_base = OTHER; note = 2'-O-methyladenosine
  modified_base 70: mod_base = cm
  modified_base 71: mod_base = um
  modified_base 72: mod_base = um
  modified_base 73: mod_base = gm
  modified_base 74: mod_base = OTHER; note = 2'-O-methyladenosine
  modified_base 75: mod_base = OTHER; note = 2'-O-methyladenosine
  modified_base 76: mod_base = OTHER; note = 2'-O-methyladenosine
  modified_base 77: mod_base = OTHER; note = 2'-O-methyladenosine
  modified_base 78: mod_base = OTHER; note = 2'-O-methyladenosine
  modified_base 79: mod_base = gm
  modified_base 80: mod_base = um
  modified_base 81: mod_base = gm
  modified_base 82: mod_base = gm
  modified_base 83: mod_base = cm
  modified_base 84: mod_base = OTHER; note = 2'-O-methyladenosine
  modified_base 85: mod_base = cm
  modified_base 86: mod_base = cm
  modified_base 87: mod_base = gm
  modified_base 88: mod_base = OTHER; note = 2'-O-methyladenosine
  modified_base 89: mod_base = gm
  modified_base 90: mod_base = um
  modified_base 91: mod_base = cm
  modified_base 92: mod_base = gm
  modified_base 93: mod_base = gm
  modified_base 94: mod_base = um
  modified_base 95: mod_base = gm
  modified_base 96: mod_base = cm
  modified_base 111: mod_base = OTHER; note = 2' fluoro modified base
  modified_base 114: mod_base = OTHER; note = 2' fluoro modified base
  modified_base 117: mod_base = OTHER; note = 2' fluoro modified base
  modified_base 119: mod_base = um
  modified_base 120: mod_base = OTHER; note = Phosphorothioate (PS) linkage
  modified_base 120: mod_base = um
  modified_base 121: mod_base = OTHER; note = Phosphorothioate (PS) linkage
  modified_base 121: mod_base = um
  modified_base 122: mod_base = OTHER; note = Phosphorothioate (PS) linkage
  modified_base 122: mod_base = um
  source 1..122: mol_type = other RNA

SEQ ID NO: 181 - RNA, 122 nt, synthetic construct; identical to SEQ ID NO: 37
  modified_base 1: mod_base = um
  modified_base 2: mod_base = OTHER; note = Phosphorothioate (PS) linkage
  modified_base 2: mod_base = um
  modified_base 3: mod_base = OTHER; note = Phosphorothioate (PS) linkage
  modified_base 3: mod_base = gm
  modified_base 4: mod_base = OTHER; note = Phosphorothioate (PS) linkage
  modified_base 29: mod_base = gm
  modified_base 30: mod_base = cm
  modified_base 31: mod_base = um
  modified_base 32: mod_base = OTHER; note = 2'-O-methyladenosine
  modified_base 33: mod_base = gm
  modified_base 34: mod_base = OTHER; note = 2'-O-methyladenosine
  modified_base 35: mod_base = OTHER; note = 2'-O-methyladenosine
  modified_base 36: mod_base = OTHER; note = 2'-O-methyladenosine
  modified_base 37: mod_base = um
  modified_base 38: mod_base = OTHER; note = 2'-O-methyladenosine
  modified_base 39: mod_base = gm
  modified_base 40: mod_base = cm
  modified_base 68: mod_base = OTHER; note = 2'-O-methyladenosine
  modified_base 69: mod_base = OTHER; note = 2'-O-methyladenosine
  modified_base 70: mod_base = cm
  modified_base 71: mod_base = um
  modified_base 72: mod_base = um
  modified_base 73: mod_base = gm
  modified_base 74: mod_base = OTHER; note = 2'-O-methyladenosine
  modified_base 75: mod_base = OTHER; note = 2'-O-methyladenosine
  modified_base 76: mod_base = OTHER; note = 2'-O-methyladenosine
  modified_base 77: mod_base = OTHER; note = 2'-O-methyladenosine
  modified_base 78: mod_base = OTHER; note = 2'-O-methyladenosine
  modified_base 79: mod_base = gm
  modified_base 80: mod_base = um
  modified_base 81: mod_base = gm
  modified_base 82: mod_base = gm
  modified_base 83: mod_base = cm
  modified_base 84: mod_base = OTHER; note = 2'-O-methyladenosine
  modified_base 85: mod_base = cm
  modified_base 86: mod_base = cm
  modified_base 87: mod_base = gm
  modified_base 88: mod_base = OTHER; note = 2'-O-methyladenosine
  modified_base 89: mod_base = gm
  modified_base 90: mod_base = um
  modified_base 91: mod_base = cm
  modified_base 92: mod_base = gm
  modified_base 93: mod_base = gm
  modified_base 94: mod_base = um
  modified_base 95: mod_base = gm
  modified_base 96: mod_base = cm
  modified_base 99: mod_base = OTHER; note = 2' fluoro modified base
  modified_base 102: mod_base = OTHER; note = 2' fluoro modified base
  modified_base 105: mod_base = OTHER; note = 2' fluoro modified base
  modified_base 108: mod_base = OTHER; note = 2' fluoro modified base
  modified_base 111: mod_base = OTHER; note = 2' fluoro modified base
  modified_base 114: mod_base = OTHER; note = 2' fluoro modified base
  modified_base 117: mod_base = OTHER; note = 2' fluoro modified base
  modified_base 119: mod_base = um
  modified_base 120: mod_base = OTHER; note = Phosphorothioate (PS) linkage
  modified_base 120: mod_base = um
  modified_base 121: mod_base = OTHER; note = Phosphorothioate (PS) linkage
  modified_base 121: mod_base = um
  modified_base 122: mod_base = OTHER; note = Phosphorothioate (PS) linkage
  modified_base 122: mod_base = um
  source 1..122: mol_type = other RNA

SEQ ID NO: 182 - RNA, 120 nt, synthetic construct
  source 1..120: mol_type = other RNA
aaaaaaaaaaaaaaaaaaaaaaaaaaaaaagcatatgactaaaaaaaaaaaaaaaaaaaaaaaaaaaaaaaaaaaaaaaaaaaaaaaaaaaaaaaaaaaaaaaaaaaaaaaaaaaaaaaa

SEQ ID NO: 183 - RNA, 130 nt, synthetic construct
  source 1..130: mol_type = other RNA
aaaaaaaaaaaaaaaaaaaaaaaaaaaaaaaaaaaaaaaagcatatgactaaaaaaaaaaaaaaaaaaaaaaaaaaaaaagcataagactaaaaaaaaaaaaaaaaaaaaaaaaaaaaaaaaaaaaaaaa

SEQ ID NO: 184 - RNA, 130 nt, synthetic construct
  source 1..130: mol_type = other RNA
aaaaaaaaaaaaaaacaaaaaaaaaaaaaaaaaaaaaaaaaaaccaaaaaaaaaaaaaaaaaaaaaaaaaaaaaaaaaaaccccaaaaaaaaaaaaaaaaaaaaaaaaaaaaaaaaaaaaaaaaaaaaaa

SEQ ID NO: 185 - RNA, 130 nt, synthetic construct
  source 1..130: mol_type = other RNA
aaaaaaaaaaaaaaataaaaaaaaaaaaaaaaaaaaaaaaaaattaaaaaaaaaaaaaaaaaaaaaaaaaaaaaaaaaaattttaaaaaaaaaaaaaaaaaaaaaaaaaaaaaaaaaaaaaaaaaaaaaa

SEQ ID NO: 186 - RNA, 120 nt, synthetic construct
  source 1..120: mol_type = other RNA
aaaaaaaaaaaaaaaaaaaaaaaaaaaaaaaaaaaaaaaaaaaaaaaaaaaaaaaaaaaaaaaaaaaaaaaaaaaaaaaaaaaaaaaaaaaaaaaaaaaaaaaaaaaaaaaaaaaaaaaa

SEQ ID NO: 187 - RNA, 130 nt, synthetic construct
  source 1..130: mol_type = other RNA
aaaaaaaaaaaaaaaaaaaaaaaaaaaaaaaaaaaaaaaaaaaaaaaaaaaaaaaaaaaaaaaaaaaaaaaaaaaaaaaaaaaaaaaaaaaaaaaaaaaaaaaaaaaaaaaaaaaaaaaaaaaaaaaaaa

SEQ ID NO: 188 - RNA, 110 nt, synthetic construct
  source 1..110: mol_type = other RNA
gctggagcctcggtggccatgcttcttgccccttgggcctccccccagcccctcctccccttcctgcacccgtacccccgtggtctttgaataaagtctgagtgggcggc

SEQ ID NO: 189 - RNA, 592 nt, synthetic construct
  source 1..592: mol_type = other RNA
aatcaacctctggattacaaaatttgtgaaagattgactgatattcttaactatgttgctccttttacgctgtgtggatatgctgctttaatgcctctgtatcatgctattgcttcccgtacggctttcgttttctcctccttgtataaatcctggttgctgtctctttatgaggagttgtggcccgttgtccgtcaacgtggcgtggtgtgctctgtgtttgctgacgcaacccccactggctggggcattgccaccacctgtcaactcctttctgggactttcgctttccccctcccgatcgccacggcagaactcatcgccgcctgccttgcccgctgctggacaggggctaggttgctgggcactgataattccgtggtgttgtcggggaagctgacgtcctttccagggctgctcgcctgtgttgccaactggatcctgcgcgggacgtccttctgctacgtcccttcggctctcaatccagcggacctcccttcccgaggccttctgccggttctgcggcctctcccgcgtcttcgctttcggcctccgacgagtcggatctccctttgggccgcctccccgcctg

SEQ ID NO: 190 - RNA, 185 nt, synthetic construct
  source 1..185: mol_type = other RNA
cactcctccatggtgatataaagaccacccacttccttcgggtgagcccctaagccatggttgtactgcactatcatcctaagacggtccttcttcggatcgcaatctcaccctggtgccgcgcttccttcgggaactgcacccgcggaccagggccgtctttgaacttttctaactgttcttac

SEQ ID NO: 191 - RNA, 76 nt, synthetic construct
  source 1..76: mol_type = other RNA
gtcatgaaggtttttcttttcctgagaaaacaagaaattgttttctcaggttttgctttttgaaaaaaaagcaaaa

SEQ ID NO: 192 - RNA, 105 nt, synthetic construct
  source 1..105: mol_type = other RNA
gtcatgaaggtttttcttttcctgagaaaacaagaaattgttttctcaggttttgctttttgaaaaaaaagcaaaagatgctggtggttggcactcctggtttcc

SEQ ID NO: 193 - RNA, 47 nt, synthetic construct
  source 1..47: mol_type = other RNA
aggaaataagagagaaaagaagagtaagaagaaatataagagccacc

SEQ ID NO: 194 - RNA, 6396 nt, synthetic construct
  source 1..6396: mol_type = other RNA
atgaaacggacagccgacggaagcgagttcgagtcaccaaagaagaagcggaaagtcgacaagaagtacagcatcggcctggacatcggcaccaactctgtgggctgggccgtgatcaccgacgagtacaaggtgcccagcaagaaattcaaggtgctgggcaacaccgaccggcacagcatcaagaagaacctgatcggagccctgctgttcgacagcggcgaaacagccgaggccacccggctgaagagaaccgccagaagaagatacaccagacggaagaaccggatctgctatctgcaagagatcttcagcaacgagatggccaaggtggacgacagcttcttccacagactggaagagtccttcctggtggaagaggataagaagcacgagcggcaccccatcttcggcaacatcgtggacgaggtggcctaccacgagaagtaccccaccatctaccacctgagaaagaaactggtggacagcaccgacaaggccgacctgcggctgatctatctggccctggcccacatgatcaagttccggggccacttcctgatcgagggcgacctgaaccccgacaacagcgacgtggacaagctgttcatccagctggtgcagacctacaaccagctgttcgaggaaaaccccatcaacgccagcggcgtggacgccaaggccatcctgtctgccagactgagcaagagcagaaagctggaaaatctgatcgcccagctgcccggcgagaagaagaatggcctgttcggaaacctgattgccctgagcctgggcctgacccccaacttcaagagcaacttcgacctggccgaggatgccaaactgcagctgagcaaggacacctacgacgacgacctggacaacctgctggcccagatcggcgaccagtacgccgacctgtttctggccgccaagaacctgtccgacgccatcctgctgagcgacatcctgagagtgaacaccgagatcaccaaggcccccctgagcgcctctatgatcaagagatacgacgagcaccaccaggacctgaccctgctgaaagctctcgtgcggcagcagctgcctgagaagtacaaagagattttcttcgaccagagcaagaacggctacgccggctacattgacggcggagccagccaggaagagttctacaagttcatcaagcccatcctggaaaagatggacggcaccgaggaactgctcgtgaagctgaagagagaggacctgctgcggaagcagcggaccttcgacaacggcagcatcccccaccagatccacctgggagagctgcacgccattctgcggcggcaggaagatttttacccattcctgaaggacaaccgggaaaagatcgagaagatcctgaccttccgcatcccctactacgtgggccctctggccaggggaaacagcagattcgcctggatgaccagaaagagcgaggaaaccatcaccccctggaacttcgaggaagtggtggacaagggcgcttccgcccagagcttcatcgagcggatgaccaacttcgataagaacctgcccaacgagaaggtgctgcccaagcacagcctgctgtacgagtacttcaccgtgtataacgagctgaccaaagtgaaatacgtgaccgagggaatgagaaagcccgccttcctgagcggcgagcagaaaaaggccatcgtggacctgctgttcaagaccaaccggaaagtgaccgtgaagcagctgaaagaggactacttcaagaaaatcgagtgcttcgactccgtggaaatctccggcgtggaagatcggttcaacgcctccctgggcacataccacgatctgctgaaaattatcaaggacaaggacttcctggacaatgaggaaaacgaggacattctggaagatatcgtgctgaccctgacactgtttgaggacagagagatgatcgaggaacggctgaaaacctatgcccacctgttcgacgacaaagtgatgaagcagctgaagcggcggagatacaccggctggggcaggctgagccggaagctgatcaacggcatccgggacaagcagtccggcaagacaatcctggatttcctgaagtccgacggcttcgccaacagaaacttcatgcagctgatccacgacgacagcctgacctttaaagaggacatccagaaagcccaggtgtccggccagggcgatagcctgcacgagcacattgccaatctggccggcagccccgccattaagaagggcatcctgcagacagtgaaggtggtggacgagctcgtgaaagtgatgggccggcacaagcccgagaacatcgtgatcgaaatggccagagagaaccagaccacccagaagggacagaagaacagccgcgagagaatgaagcggatcgaagagggcatcaaagagctgggcagccagatcctgaaagaacaccccgtggaaaacacccagctgcagaacgagaagctgtacctgtactacctgcagaatgggcgggatatgtacgtggaccaggaactggacatcaaccggctgtccgactacgatgtggacgctatcgtgcctcagagctttctgaaggacgactccatcgacaacaaggtgctgaccagaagcgacaagaaccggggcaagagcgacaacgtgccctccgaagaggtcgtgaagaagatgaagaactactggcggcagctgctgaacgccaagctgattacccagagaaagttcgacaatctgaccaaggccgagagaggcggcctgagcgaactggataaggccggcttcatcaagagacagctggtggaaacccggcagatcacaaagcacgtggcacagatcctggactcccggatgaacactaagtacgacgagaatgacaagctgatccgggaagtgaaagtgatcaccctgaagtccaagctggtgtccgatttccggaaggatttccagttttacaaagtgcgcgagatcaacaactaccaccacgcccacgacgcctacctgaacgccgtcgtgggaaccgccctgatcaaaaagtaccctaagctggaaagcgagttcgtgtacggcgactacaaggtgtacgacgtgcggaagatgatcgccaagagcgagcaggaaatcggcaaggctaccgccaagtacttcttctacagcaacatcatgaactttttcaagaccgagattaccctggccaacggcgagatccggaagcggcctctgatcgagacaaacggcgaaaccggggagatcgtgtgggataagggccgggattttgccaccgtgcggaaagtgctgagcatgccccaagtgaatatcgtgaaaaagaccgaggtgcagacaggcggcttcagcaaagagtctatcctgcccaagaggaacagcgataagctgatcgccagaaagaaggactgggaccctaagaagtacggcggcttcgacagccccaccgtggcctattctgtgctggtggtggccaaagtggaaaagggcaagtccaagaaactgaagagtgtgaaagagctgctggggatcaccatcatggaaagaagcagcttcgagaagaatcccatcgactttctggaagccaagggctacaaagaagtgaaaaaggacctgatcatcaagctgcctaagtactccctgttcgagctggaaaacggccggaagagaatgctggcctctgccggcgaactgcagaagggaaacgaactggccctgccctccaaatatgtgaacttcctgtacctggccagccactatgagaagctgaagggctcccccgaggataatgagcagaaacagctgtttgtggaacagcacaagcactacctggacgagatcatcgagcagatcagcgagttctccaagagagtgatcctggccgacgctaatctggacaaagtgctgtccgcctacaacaagcaccgggataagcccatcagagagcaggccgagaatatcatccacctgtttaccctgaccaatctgggagcccctgccgccttcaagtactttgacaccaccatcgaccggaagaggtacaccagcaccaaagaggtgctggacgccaccctgatccaccagagcatcaccggcctgtacgagacacggatcgacctgtctcagctgggaggtgactccggcggaagctctggtggcagcaagcggaccgccgacggctctgaattcgagagccctaagaagaaaagaaaggtgagcggaggctctagcggcggaagcaccctgaacattgaagacgagtatagactgcatgaaacaagcaaggaacccgacgtgtccctgggctccacctggctgtccgactttccccaggcctgggccgagacaggaggaatgggcctggccgtgcggcaggcacccctgatcatccctctgaaggccacctctacacccgtgagcatcaagcagtaccctatgtctcaggaggccagactgggcatcaagcctcacatccagaggctgctggaccagggcatcctggtgccatgccagagcccctggaacacaccactgctgcccgtgaagaagccaggcaccaatgactatagacccgtgcaggatctgagagaggtgaacaagagggtggaggatatccaccccaccgtgcccaacccttacaatctgctgtccggcctgcccccttctcaccagtggtatacagtgctggacctgaaggatgccttcttttgtctgagactgcaccctaccagccagccactgttcgcctttgagtggagggaccctgagatgggcatctctggccagctgacctggacacgcctgcctcagggcttcaagaatagcccaacactgtttaacgaggccctgcaccgcgacctggcagatttccggatccagcacccagatctgatcctgctgcagtacgtggacgatctgctgctggccgccaccagcgagctggattgccagcagggaacacgcgccctgctgcagaccctgggaaacctgggatatagggcatccgccaagaaggcccagatctgtcagaagcaggtgaagtacctgggctatctgctgaaggagggccagagatggctgacagaggccaggaaggagacagtgatgggccagccaacacccaagaccccaagacagctgagggagttcctgggcaaagcaggattttgcaggctgttcatcccaggattcgcagagatggcagcacctctgtacccactgaccaagccgggcaccctgtttaattggggccctgaccagcagaaggcctatcaggagatcaagcaggccctgctgacagcaccagccctgggcctgccagacctgaccaagcctttcgagctgtttgtggatgagaagcagggctacgccaagggcgtgctgacccagaagctgggaccatggagacggcccgtggcctatctgtccaagaagctggacccagtggcagcaggatggccaccatgcctgaggatggtggcagcaatcgccgtgctgacaaaggatgccggcaagctgaccatgggacagccactggtcatcctggcaccacacgcagtggaggccctggtgaagcagcctccagatcgctggctgtctaacgcccggatgacacactaccaggccctgctgctggacaccgatcgcgtgcagtttggccctgtggtggccctgaatccagccaccctgctgcctctgccagaggagggcctgcagcacaactgtctggacatcctggcagaggcacacggaacaaggccagacctgaccgatcagcccctgcctgacgccgatcacacatggtataccgatggaagctccctgctgcaggagggccagaggaaggcaggagcagcagtgaccacagagacagaagtgatctgggccaaggccctgccagcaggcacatccgcccagcgggccgagctgatcgccctgacccaggccctgaagatggccgagggcaagaagctgaacgtgtacacagactccagatatgccttcgccaccgcacacatccacggagagatctacaggcgccggggctggctgacctctgagggcaaggagatcaagaacaaggatgagatcctggccctgctgaaggccctgtttctgcccaagcggctgagcatcatccactgtcctggacaccagaagggacactccgccgaggcaaggggcaatcggatggccgaccaggccgccagaaaggctgctattactgaaactcccgacacttccactctgctgattgaaaactcctccccttctggcggctcaaaaagaaccgccgacggcagcgaattcgagtctcccaagaagaagaggaaagtcggctctggccctgccgctaagagagtgaagctggactga

SEQ ID NO: 195 - RNA, 822 nt, synthetic construct
  source 1..822: mol_type = other RNA
gctggagcctcggtggccatgcttcttgccccttgggcctccccccagcccctcctccccttcctgcacccgtacccccgtggtctttgaataaagtctgagtgggcggcaatcaacctctggattacaaaatttgtgaaagattgactgatattcttaactatgttgctccttttacgctgtgtggatatgctgctttaatgcctctgtatcatgctattgcttcccgtacggctttcgttttctcctccttgtataaatcctggttgctgtctctttatgaggagttgtggcccgttgtccgtcaacgtggcgtggtgtgctctgtgtttgctgacgcaacccccactggctggggcattgccaccacctgtcaactcctttctgggactttcgctttccccctcccgatcgccacggcagaactcatcgccgcctgccttgcccgctgctggacaggggctaggttgctgggcactgataattccgtggtgttgtcggggaagctgacgtcctttccagggctgctcgcctgtgttgccaactggatcctgcgcgggacgtccttctgctacgtcccttcggctctcaatccagcggacctcccttcccgaggccttctgccggttctgcggcctctcccgcgtcttcgctttcggcctccgacgagtcggatctccctttgggccgcctccccgcctgaaaaaaaaaaaaaaaaaaaaaaaaaaaaaagcatatgactaaaaaaaaaaaaaaaaaaaaaaaaaaaaaaaaaaaaaaaaaaaaaaaaaaaaaaaaaaaaaaaaaaaaaaaaaaaaaaaa

SEQ ID NO: 196 - RNA, 832 nt, synthetic construct
  source 1..832: mol_type = other RNA
gctggagcctcggtggccatgcttcttgccccttgggcctccccccagcccctcctccccttcctgcacccgtacccccgtggtctttgaataaagtctgagtgggcggcaatcaacctctggattacaaaatttgtgaaagattgactgatattcttaactatgttgctccttttacgctgtgtggatatgctgctttaatgcctctgtatcatgctattgcttcccgtacggctttcgttttctcctccttgtataaatcctggttgctgtctctttatgaggagttgtggcccgttgtccgtcaacgtggcgtggtgtgctctgtgtttgctgacgcaacccccactggctggggcattgccaccacctgtcaactcctttctgggactttcgctttccccctcccgatcgccacggcagaactcatcgccgcctgccttgcccgctgctggacaggggctaggttgctgggcactgataattccgtggtgttgtcggggaagctgacgtcctttccagggctgctcgcctgtgttgccaactggatcctgcgcgggacgtccttctgctacgtcccttcggctctcaatccagcggacctcccttcccgaggccttctgccggttctgcggcctctcccgcgtcttcgctttcggcctccgacgagtcggatctccctttgggccgcctccccgcctgaaaaaaaaaaaaaaaaaaaaaaaaaaaaaaaaaaaaaaaagcatatgactaaaaaaaaaaaaaaaaaaaaaaaaaaaaaagcataagactaaaaaaaaaaaaaaaaaaaaaaaaaaaaaaaaaaaaaaaa

SEQ ID NO: 197 - RNA, 832 nt, synthetic construct
  source 1..832: mol_type = other RNA
gctggagcctcggtggccatgcttcttgccccttgggcctccccccagcccctcctccccttcctgcacccgtacccccgtggtctttgaataaagtctgagtgggcggcaatcaacctctggattacaaaatttgtgaaagattgactgatattcttaactatgttgctccttttacgctgtgtggatatgctgctttaatgcctctgtatcatgctattgcttcccgtacggctttcgttttctcctccttgtataaatcctggttgctgtctctttatgaggagttgtggcccgttgtccgtcaacgtggcgtggtgtgctctgtgtttgctgacgcaacccccactggctggggcattgccaccacctgtcaactcctttctgggactttcgctttccccctcccgatcgccacggcagaactcatcgccgcctgccttgcccgctgctggacaggggctaggttgctgggcactgataattccgtggtgttgtcggggaagctgacgtcctttccagggctgctcgcctgtgttgccaactggatcctgcgcgggacgtccttctgctacgtcccttcggctctcaatccagcggacctcccttcccgaggccttctgccggttctgcggcctctcccgcgtcttcgctttcggcctccgacgagtcggatctccctttgggccgcctccccgcctgaaaaaaaaaaaaaaacaaaaaaaaaaaaaaaaaaaaaaaaaaaccaaaaaaaaaaaaaaaaaaaaaaaaaaaaaaaaaaaccccaaaaaaaaaaaaaaaaaaaaaaaaaaaaaaaaaaaaaaaaaaaaaa

SEQ ID NO: 198 - RNA, 832 nt, synthetic construct
  source 1..832: mol_type = other RNA
gctggagcctcggtggccatgcttcttgccccttgggcctccccccagcccctcctccccttcctgcacccgtacccccgtggtctttgaataaagtctgagtgggcggcaatcaacctctggattacaaaatttgtgaaagattgactgatattcttaactatgttgctccttttacgctgtgtggatatgctgctttaatgcctctgtatcatgctattgcttcccgtacggctttcgttttctcctccttgtataaatcctggttgctgtctctttatgaggagttgtggcccgttgtccgtcaacgtggcgtggtgtgctctgtgtttgctgacgcaacccccactggctggggcattgccaccacctgtcaactcctttctgggactttcgctttccccctcccgatcgccacggcagaactcatcgccgcctgccttgcccgctgctggacaggggctaggttgctgggcactgataattccgtggtgttgtcggggaagctgacgtcctttccagggctgctcgcctgtgttgccaactggatcctgcgcgggacgtccttctgctacgtcccttcggctctcaatccagcggacctcccttcccgaggccttctgccggttctgcggcctctcccgcgtcttcgctttcggcctccgacgagtcggatctccctttgggccgcctccccgcctgaaaaaaaaaaaaaaataaaaaaaaaaaaaaaaaaaaaaaaaaattaaaaaaaaaaaaaaaaaaaaaaaaaaaaaaaaaaattttaaaaaaaaaaaaaaaaaaaaaaaaaaaaaaaaaaaaaaaaaaaaaa

SEQ ID NO: 199 - RNA, 822 nt, synthetic construct
  source 1..822: mol_type = other RNA
gctggagcctcggtggccatgcttcttgccccttgggcctccccccagcccctcctccccttcctgcacccgtacccccgtggtctttgaataaagtctgagtgggcggcaatcaacctctggattacaaaatttgtgaaagattgactgatattcttaactatgttgctccttttacgctgtgtggatatgctgctttaatgcctctgtatcatgctattgcttcccgtacggctttcgttttctcctccttgtataaatcctggttgctgtctctttatgaggagttgtggcccgttgtccgtcaacgtggcgtggtgtgctctgtgtttgctgacgcaacccccactggctggggcattgccaccacctgtcaactcctttctgggactttcgctttccccctcccgatcgccacggcagaactcatcgccgcctgccttgcccgctgctggacaggggctaggttgctgggcactgataattccgtggtgttgtcggggaagctgacgtcctttccagggctgctcgcctgtgttgccaactggatcctgcgcgggacgtccttctgctacgtcccttcggctctcaatccagcggacctcccttcccgaggccttctgccggttctgcggcctctcccgcgtcttcgctttcggcctccgacgagtcggatctccctttgggccgcctccccgcctgaaaaaaaaaaaaaaaaaaaaaaaaaaaaaaaaaaaaaaaaaaaaaaaaaaaaaaaaaaaaaaaaaaaaaaaaaaaaaaaaaaaaaaaaaaaaaaaaaaaaaaaaaaaaaaaaaaaaaaaa

SEQ ID NO: 200 - RNA, 832 nt, synthetic construct
  source 1..832: mol_type = other RNA
gctggagcctcggtggccatgcttcttgccccttgggcctccccccagcccctcctccccttcctgcacccgtacccccgtggtctttgaataaagtctgagtgggcggcaatcaacctctggattacaaaatttgtgaaagattgactgatattcttaactatgttgctccttttacgctgtgtggatatgctgctttaatgcctctgtatcatgctattgcttcccgtacggctttcgttttctcctccttgtataaatcctggttgctgtctctttatgaggagttgtggcccgttgtccgtcaacgtggcgtggtgtgctctgtgtttgctgacgcaacccccactggctggggcattgccaccacctgtcaactcctttctgggactttcgctttccccctcccgatcgccacggcagaactcatcgccgcctgccttgcccgctgctggacaggggctaggttgctgggcactgataattccgtggtgttgtcggggaagctgacgtcctttccagggctgctcgcctgtgttgccaactggatcctgcgcgggacgtccttctgctacgtcccttcggctctcaatccagcggacctcccttcccgaggccttctgccggttctgcggcctctcccgcgtcttcgctttcggcctccgacgagtcggatctccctttgggccgcctccccgcctgaaaaaaaaaaaaaaaaaaaaaaaaaaaaaaaaaaaaaaaaaaaaaaaaaaaaaaaaaaaaaaaaaaaaaaaaaaaaaaaaaaaaaaaaaaaaaaaaaaaaaaaaaaaaaaaaaaaaaaaaaaaaaaaaaa

SEQ ID NO: 201 - RNA, 186 nt, synthetic construct
  source 1..186: mol_type = other RNA
gctggagcctcggtggccatgcttcttgccccttgggcctccccccagcccctcctccccttcctgcacccgtacccccgtggtctttgaataaagtctgagtgggcggcgtcatgaaggtttttcttttcctgagaaaacaagaaattgttttctcaggttttgctttttgaaaaaaaagcaaaa

SEQ ID NO: 202 - RNA, 415 nt, synthetic construct
  source 1..415: mol_type = other RNA
gctggagcctcggtggccatgcttcttgccccttgggcctccccccagcccctcctccccttcctgcacccgtacccccgtggtctttgaataaagtctgagtgggcggccactcctccatggtgatataaagaccacccacttccttcgggtgagcccctaagccatggttgtactgcactatcatcctaagacggtccttcttcggatcgcaatctcaccctggtgccgcgcttccttcgggaactgcacccgcggaccagggccgtctttgaacttttctaactgttcttacaaaaaaaaaaaaaaaaaaaaaaaaaaaaaaaaaaaaaaaaaaaaaaaaaaaaaaaaaaaaaaaaaaaaaaaaaaaaaaaaaaaaaaaaaaaaaaaaaaaaaaaaaaaaaaaaaaaaaaaa

SEQ ID NO: 203 - RNA, 425 nt, synthetic construct
  source 1..425: mol_type = other RNA
gctggagcctcggtggccatgcttcttgccccttgggcctccccccagcccctcctccccttcctgcacccgtacccccgtggtctttgaataaagtctgagtgggcggccactcctccatggtgatataaagaccacccacttccttcgggtgagcccctaagccatggttgtactgcactatcatcctaagacggtccttcttcggatcgcaatctcaccctggtgccgcgcttccttcgggaactgcacccgcggaccagggccgtctttgaacttttctaactgttcttacaaaaaaaaaaaaaaaaaaaaaaaaaaaaaaaaaaaaaaaaaaaaaaaaaaaaaaaaaaaaaaaaaaaaaaaaaaaaaaaaaaaaaaaaaaaaaaaaaaaaaaaaaaaaaaaaaaaaaaaaaaaaaaaaaa

SEQ ID NO: 204 - RNA, 415 nt, synthetic construct
  source 1..415: mol_type = other RNA
gctggagcctcggtggccatgcttcttgccccttgggcctccccccagcccctcctccccttcctgcacccgtacccccgtggtctttgaataaagtctgagtgggcggccactcctccatggtgatataaagaccacccacttccttcgggtgagcccctaagccatggttgtactgcactatcatcctaagacggtccttcttcggatcgcaatctcaccctggtgccgcgcttccttcgggaactgcacccgcggaccagggccgtctttgaacttttctaactgttcttacaaaaaaaaaaaaaaaaaaaaaaaaaaaaaagcatatgactaaaaaaaaaaaaaaaaaaaaaaaaaaaaaaaaaaaaaaaaaaaaaaaaaaaaaaaaaaaaaaaaaaaaaaaaaaaaaaaa

SEQ ID NO: 205 - RNA, 425 nt, synthetic construct
  source 1..425: mol_type = other RNA
gctggagcctcggtggccatgcttcttgccccttgggcctccccccagcccctcctccccttcctgcacccgtacccccgtggtctttgaataaagtctgagtgggcggccactcctccatggtgatataaagaccacccacttccttcgggtgagcccctaagccatggttgtactgcactatcatcctaagacggtccttcttcggatcgcaatctcaccctggtgccgcgcttccttcgggaactgcacccgcggaccagggccgtctttgaacttttctaactgttcttacaaaaaaaaaaaaaaaaaaaaaaaaaaaaaaaaaaaaaaaagcatatgactaaaaaaaaaaaaaaaaaaaaaaaaaaaaaagcataagactaaaaaaaaaaaaaaaaaaaaaaaaaaaaaaaaaaaaaaaa

SEQ ID NO: 206 - RNA, 425 nt, synthetic construct
  source 1..425: mol_type = other RNA
gctggagcctcggtggccatgcttcttgccccttgggcctccccccagcccctcctccccttcctgcacccgtacccccgtggtctttgaataaagtctgagtgggcggccactcctccatggtgatataaagaccacccacttccttcgggtgagcccctaagccatggttgtactgcactatcatcctaagacggtccttcttcggatcgcaatctcaccctggtgccgcgcttccttcgggaactgcacccgcggaccagggccgtctttgaacttttctaactgttcttacaaaaaaaaaaaaaaacaaaaaaaaaaaaaaaaaaaaaaaaaaaccaaaaaaaaaaaaaaaaaaaaaaaaaaaaaaaaaaaccccaaaaaaaaaaaaaaaaaaaaaaaaaaaaaaaaaaaaaaaaaaaaaa

SEQ ID NO: 207 - RNA, 425 nt, synthetic construct
  source 1..425: mol_type = other RNA
gctggagcctcggtggccatgcttcttgccccttgggcctccccccagcccctcctccccttcctgcacccgtacccccgtggtctttgaataaagtctgagtgggcggccactcctccatggtgatataaagaccacccacttccttcgggtgagcccctaagccatggttgtactgcactatcatcctaagacggtccttcttcggatcgcaatctcaccctggtgccgcgcttccttcgggaactgcacccgcggaccagggccgtctttgaacttttctaactgttcttacaaaaaaaaaaaaaaataaaaaaaaaaaaaaaaaaaaaaaaaaattaaaaaaaaaaaaaaaaaaaaaaaaaaaaaaaaaaattttaaaaaaaaaaaaaaaaaaaaaaaaaaaaaaaaaaaaaaaaaaaaaa

SEQ ID NO: 208 - RNA, 305 nt, synthetic construct
  source 1..305: mol_type = other RNA
cactcctccatggtgatataaagaccacccacttccttcgggtgagcccctaagccatggttgtactgcactatcatcctaagacggtccttcttcggatcgcaatctcaccctggtgccgcgcttccttcgggaactgcacccgcggaccagggccgtctttgaacttttctaactgttcttacaaaaaaaaaaaaaaaaaaaaaaaaaaaaaaaaaaaaaaaaaaaaaaaaaaaaaaaaaaaaaaaaaaaaaaaaaaaaaaaaaaaaaaaaaaaaaaaaaaaaaaaaaaaaaaaaaaaaaaaa

SEQ ID NO: 209 - RNA, 315 nt, synthetic construct
  source 1..315: mol_type = other RNA
cactcctccatggtgatataaagaccacccacttccttcgggtgagcccctaagccatggttgtactgcactatcatcctaagacggtccttcttcggatcgcaatctcaccctggtgccgcgcttccttcgggaactgcacccgcggaccagggccgtctttgaacttttctaactgttcttacaaaaaaaaaaaaaaaaaaaaaaaaaaaaaaaaaaaaaaaaaaaaaaaaaaaaaaaaaaaaaaaaaaaaaaaaaaaaaaaaaaaaaaaaaaaaaaaaaaaaaaaaaaaaaaaaaaaaaaaaaaaaaaaaaa

SEQ ID NO: 210 - RNA, 305 nt, synthetic construct
  source 1..305: mol_type = other RNA
cactcctccatggtgatataaagaccacccacttccttcgggtgagcccctaagccatggttgtactgcactatcatcctaagacggtccttcttcggatcgcaatctcaccctggtgccgcgcttccttcgggaactgcacccgcggaccagggccgtctttgaacttttctaactgttcttacaaaaaaaaaaaaaaaaaaaaaaaaaaaaaagcatatgactaaaaaaaaaaaaaaaaaaaaaaaaaaaaaaaaaaaaaaaaaaaaaaaaaaaaaaaaaaaaaaaaaaaaaaaaaaaaaaaa

SEQ ID NO: 211 - RNA, 315 nt, synthetic construct
  source 1..315: mol_type = other RNA
cactcctccatggtgatataaagaccacccacttccttcgggtgagcccctaagccatggttgtactgcactatcatcctaagacggtccttcttcggatcgcaatctcaccctggtgccgcgcttccttcgggaactgcacccgcggaccagggccgtctttgaacttttctaactgttcttacaaaaaaaaaaaaaaaaaaaaaaaaaaaaaaaaaaaaaaaagcatatgactaaaaaaaaaaaaaaaaaaaaaaaaaaaaaagcataagactaaaaaaaaaaaaaaaaaaaaaaaaaaaaaaaaaaaaaaaa

SEQ ID NO: 212 - RNA, 315 nt, synthetic construct
  source 1..315: mol_type = other RNA
cactcctccatggtgatataaagaccacccacttccttcgggtgagcccctaagccatggttgtactgcactatcatcctaagacggtccttcttcggatcgcaatctcaccctggtgccgcgcttccttcgggaactgcacccgcggaccagggccgtctttgaacttttctaactgttcttacaaaaaaaaaaaaaaacaaaaaaaaaaaaaaaaaaaaaaaaaaaccaaaaaaaaaaaaaaaaaaaaaaaaaaaaaaaaaaaccccaaaaaaaaaaaaaaaaaaaaaaaaaaaaaaaaaaaaaaaaaaaaaa

SEQ ID NO: 213 - RNA, 315 nt, synthetic construct
  source 1..315: mol_type = other RNA
cactcctccatggtgatataaagaccacccacttccttcgggtgagcccctaagccatggttgtactgcactatcatcctaagacggtccttcttcggatcgcaatctcaccctggtgccgcgcttccttcgggaactgcacccgcggaccagggccgtctttgaacttttctaactgttcttacaaaaaaaaaaaaaaataaaaaaaaaaaaaaaaaaaaaaaaaaattaaaaaaaaaaaaaaaaaaaaaaaaaaaaaaaaaaattttaaaaaaaaaaaaaaaaaaaaaaaaaaaaaaaaaaaaaaaaaaaaaa

SEQ ID NO: 214 - RNA, 335 nt, synthetic construct
  source 1..335: mol_type = other RNA
gctggagcctcggtggccatgcttcttgccccttgggcctccccccagcccctcctccccttcctgcacccgtacccccgtggtctttgaataaagtctgagtgggcggcgtcatgaaggtttttcttttcctgagaaaacaagaaattgttttctcaggttttgctttttgaaaaaaaagcaaaagatgctggtggttggcactcctggtttccaaaaaaaaaaaaaaaaaaaaaaaaaaaaaaaaaaaaaaaaaaaaaaaaaaaaaaaaaaaaaaaaaaaaaaaaaaaaaaaaaaaaaaaaaaaaaaaaaaaaaaaaaaaaaaaaaaaaaaaa

SEQ ID NO: 215 - RNA, 345 nt, synthetic construct
  source 1..345: mol_type = other RNA
gctggagcctcggtggccatgcttcttgccccttgggcctccccccagcccctcctccccttcctgcacccgtacccccgtggtctttgaataaagtctgagtgggcggcgtcatgaaggtttttcttttcctgagaaaacaagaaattgttttctcaggttttgctttttgaaaaaaaagcaaaagatgctggtggttggcactcctggtttccaaaaaaaaaaaaaaaaaaaaaaaaaaaaaaaaaaaaaaaaaaaaaaaaaaaaaaaaaaaaaaaaaaaaaaaaaaaaaaaaaaaaaaaaaaaaaaaaaaaaaaaaaaaaaaaaaaaaaaaaaaaaaaaaaa

SEQ ID NO: 216 - RNA, 335 nt, synthetic construct
  source 1..335: mol_type = other RNA
gctggagcctcggtggccatgcttcttgccccttgggcctccccccagcccctcctccccttcctgcacccgtacccccgtggtctttgaataaagtctgagtgggcggcgtcatgaaggtttttcttttcctgagaaaacaagaaattgttttctcaggttttgctttttgaaaaaaaagcaaaagatgctggtggttggcactcctggtttccaaaaaaaaaaaaaaaaaaaaaaaaaaaaaagcatatgactaaaaaaaaaaaaaaaaaaaaaaaaaaaaaaaaaaaaaaaaaaaaaaaaaaaaaaaaaaaaaaaaaaaaaaaaaaaaaaaa

SEQ ID NO: 217 - RNA, 345 nt, synthetic construct
  source 1..345: mol_type = other RNA
gctggagcctcggtggccatgcttcttgccccttgggcctccccccagcccctcctccccttcctgcacccgtacccccgtggtctttgaataaagtctgagtgggcggcgtcatgaaggtttttcttttcctgagaaaacaagaaattgttttctcaggttttgctttttgaaaaaaaagcaaaagatgctggtggttggcactcctggtttccaaaaaaaaaaaaaaaaaaaaaaaaaaaaaaaaaaaaaaaagcatatgactaaaaaaaaaaaaaaaaaaaaaaaaaaaaaagcataagactaaaaaaaaaaaaaaaaaaaaaaaaaaaaaaaaaaaaaaaa

SEQ ID NO: 218 - RNA, 345 nt, synthetic construct
  source 1..345: mol_type = other RNA
gctggagcctcggtggccatgcttcttgccccttgggcctccccccagcccctcctccccttcctgcacccgtacccccgtggtctttgaataaagtctgagtgggcggcgtcatgaaggtttttcttttcctgagaaaacaagaaattgttttctcaggttttgctttttgaaaaaaaagcaaaagatgctggtggttggcactcctggtttccaaaaaaaaaaaaaaacaaaaaaaaaaaaaaaaaaaaaaaaaaaccaaaaaaaaaaaaaaaaaaaaaaaaaaaaaaaaaaaccccaaaaaaaaaaaaaaaaaaaaaaaaaaaaaaaaaaaaaaaaaaaaaa

SEQ ID NO: 219 - RNA, 345 nt, synthetic construct
  source 1..345: mol_type = other RNA
gctggagcctcggtggccatgcttcttgccccttgggcctccccccagcccctcctccccttcctgcacccgtacccccgtggtctttgaataaagtctgagtgggcggcgtcatgaaggtttttcttttcctgagaaaacaagaaattgttttctcaggttttgctttttgaaaaaaaagcaaaagatgctggtggttggcactcctggtttccaaaaaaaaaaaaaaataaaaaaaaaaaaaaaaaaaaaaaaaaattaaaaaaaaaaaaaaaaaaaaaaaaaaaaaaaaaaattttaaaaaaaaaaaaaaaaaaaaaaaaaaaaaaaaaaaaaaaaaaaaaa

SEQ ID NO: 220 - RNA, 7265 nt, synthetic construct; identical to SEQ ID NO: 137
  source 1..7265: mol_type = other RNA

SEQ ID NO: 221 - RNA, 7275 nt, synthetic construct; identical to SEQ ID NO: 138
  source 1..7275: mol_type = other RNA

SEQ ID NO: 222 - RNA, 7275 nt, synthetic construct; identical to SEQ ID NO: 139
  source 1..7275: mol_type = other RNA

SEQ ID NO: 223 - RNA, 7275 nt, synthetic construct; identical to SEQ ID NO: 140
  source 1..7275: mol_type = other RNA

SEQ ID NO: 224 - RNA, 7265 nt, synthetic construct
  source 1..7265: mol_type = other RNA
aggaaataagagagaaaagaagagtaagaagaaatataagagccaccatgaaacggacagccgacggaagcgagttcgagtcaccaaagaagaagcggaaagtcgacaagaagtacagcatcggcctggacatcggcaccaactctgtgggctgggccgtgatcaccgacgagtacaaggtgcccagcaagaaattcaaggtgctgggcaacaccgaccggcacagcatcaagaagaacctgatcggagccctgctgttcgacagcggcgaaacagccgaggccacccggctgaagagaaccgccagaagaagatacaccagacggaagaaccggatctgctatctgcaagagatcttcagcaacgagatggccaaggtggacgacagcttcttccacagactggaagagtccttcctggtggaagaggataagaagcacgagcggcaccccatcttcggcaacatcgtggacgaggtggcctaccacgagaagtaccccaccatctaccacctgagaaagaaactggtggacagcaccgacaaggccgacctgcggctgatctatctggccctggcccacatgatcaagttccggggccacttcctgatcgagggcgacctgaaccccgacaacagcgacgtggacaagctgttcatccagctggtgcagacctacaaccagctgttcgaggaaaaccccatcaacgccagcggcgtggacgccaaggccatcctgtctgccagactgagcaagagcagaaagctggaaaatctgatcgcccagctgcccggcgagaagaagaatggcctgttcggaaacctgattgccctgagcctgggcctgacccccaacttcaagagcaacttcgacctggccgaggatgccaaactgcagctgagcaaggacacctacgacgacgacctggacaacctgctggcccagatcggcgaccagtacgccgacctgtttctggccgccaagaacctgtccgacgccatcctgctgagcgacatcctgagagtgaacaccgagatcaccaaggcccccctgagcgcctctatgatcaagagatacgacgagcaccaccaggacctgaccctgctgaaagctctcgtgcggcagcagctgcctgagaagtacaaagagattttcttcgaccagagcaagaacggctacgccggctacattgacggcggagccagccaggaagagttctacaagttcatcaagcccatcctggaaaagatggacggcaccgaggaactgctcgtgaagctgaagagagaggacctgctgcggaagcagcggaccttcgacaacggcagcatcccccaccagatccacctgggagagctgcacgccattctgcggcggcaggaagatttttacccattcctgaaggacaaccgggaaaagatcgagaagatcctgaccttccgcatcccctactacgtgggccctctggccaggggaaacagcagattcgcctggatgaccagaaagagcgaggaaaccatcaccccctggaacttcgaggaagtggtggacaagggcgcttccgcccagagcttcatcgagcggatgaccaacttcgataagaacctgcccaacgagaaggtgctgcccaagcacagcctgctgtacgagtacttcaccgtgtataacgagctgaccaaagtgaaatacgtgaccgagggaatgagaaagcccgccttcctgagcggcgagcagaaaaaggccatcgtggacctgctgttcaagaccaaccggaaagtgaccgtgaagcagctgaaagaggactacttcaagaaaatcgagtgcttcgactccgtggaaatctccggcgtggaagatcggttcaacgcctccctgggcacataccacgatctgctgaaaattatcaaggacaaggacttcctggacaatgaggaaaacgaggacattctggaagatatcgtgctgaccctgacactgtttgaggacagagagatgatcgaggaacggctgaaaacctatgcccacctgttcgacgacaaagtgatgaagcagctgaagcggcggagatacaccggctggggcaggctgagccggaagctgatcaacggcatccgggacaagcagtccggcaagacaatcctggatttcctgaagtccgacggcttcgccaacagaaacttcatgcagctgatccacgacgacagcctgacctttaaagaggacatccagaaagcccaggtgtccggccagggcgatagcctgcacgagcacattgccaatctggccggcagccccgccattaagaagggcatcctgcagacagtgaaggtggtggacgagctcgtgaaagtgatgggccggcacaagcccgagaacatcgtgatcgaaatggccagagagaaccagaccacccagaagggacagaagaacagccgcgagagaatgaagcggatcgaagagggcatcaaagagctgggcagccagatcctgaaagaacaccccgtggaaaacacccagctgcagaacgagaagctgtacctgtactacctgcagaatgggcgggatatgtacgtggaccaggaactggacatcaaccggctgtccgactacgatgtggacgctatcgtgcctcagagctttctgaaggacgactccatcgacaacaaggtgctgaccagaagcgacaagaaccggggcaagagcgacaacgtgccctccgaagaggtcgtgaagaagatgaagaactactggcggcagctgctgaacgccaagctgattacccagagaaagttcgacaatctgaccaaggccgagagaggcggcctgagcgaactggataaggccggcttcatcaagagacagctggtggaaacccggcagatcacaaagcacgtggcacagatcctggactcccggatgaacactaagtacgacgagaatgacaagctgatccgggaagtgaaagtgatcaccctgaagtccaagctggtgtccgatttccggaaggatttccagttttacaaagtgcgcgagatcaacaactaccaccacgcccacgacgcctacctgaacgccgtcgtgggaaccgccctgatcaaaaagtaccctaagctggaaagcgagttcgtgtacggcgactacaaggtgtacgacgtgcggaagatgatcgccaagagcgagcaggaaatcggcaaggctaccgccaagtacttcttctacagcaacatcatgaactttttcaagaccgagattaccctggccaacggcgagatccggaagcggcctctgatcgagacaaacggcgaaaccggggagatcgtgtgggataagggccgggattttgccaccgtgcggaaagtgctgagcatgccccaagtgaatatcgtgaaaaagaccgaggtgcagacaggcggcttcagcaaagagtctatcctgcccaagaggaacagcgataagctgatcgccagaaagaaggactgggaccctaagaagtacggcggcttcgacagccccaccgtggcctattctgtgctggtggtggccaaagtggaaaagggcaagtccaagaaactgaagagtgtgaaagagctgctggggatcaccatcatggaaagaagcagcttcgagaagaatcccatcgactttctggaagccaagggctacaaagaagtgaaaaaggacctgatcatcaagctgcctaagtactccctgttcgagctggaaaacggccggaagagaatgctggcctctgccggcgaactgcagaagggaaacgaactggccctgccctccaaatatgtgaacttcctgtacctggccagccactatgagaagctgaagggctcccccgaggataatgagcagaaacagctgtttgtggaacagcacaagcactacctggacgagatcatcgagcagatcagcgagttctccaagagagtgatcctggccgacgctaatctggacaaagtgctgtccgcctacaacaagcaccgggataagcccatcagagagcaggccgagaatatcatccacctgtttaccctgaccaatctgggagcccctgccgccttcaagtactttgacaccaccatcgaccggaagaggtacaccagcaccaaagaggtgctggacgccaccctgatccaccagagcatcaccggcctgtacgagacacggatcgacctgtctcagctgggaggtgactccggcggaagctctggtggcagcaagcggaccgccgacggctctgaattcgagagccctaagaagaaaagaaaggtgagcggaggctctagcggcggaagcaccctgaacattgaagacgagtatagactgcatgaaacaagcaaggaacccgacgtgtccctgggctccacctggctgtccgactttccccaggcctgggccgagacaggaggaatgggcctggccgtgcggcaggcacccctgatcatccctctgaaggccacctctacacccgtgagcatcaagcagtaccctatgtctcaggaggccagactgggcatcaagcctcacatccagaggctgctggaccagggcatcctggtgccatgccagagcccctggaacacaccactgctgcccgtgaagaagccaggcaccaatgactatagacccgtgcaggatctgagagaggtgaacaagagggtggaggatatccaccccaccgtgcccaacccttacaatctgctgtccggcctgcccccttctcaccagtggtatacagtgctggacctgaaggatgccttcttttgtctgagactgcaccctaccagccagccactgttcgcctttgagtggagggaccctgagatgggcatctctggccagctgacctggacacgcctgcctcagggcttcaagaatagcccaacactgtttaacgaggccctgcaccgcgacctggcagatttccggatccagcacccagatctgatcctgctgcagtacgtggacgatctgctgctggccgccaccagcgagctggattgccagcagggaacacgcgccctgctgcagaccctgggaaacctgggatatagggcatccgccaagaaggcccagatctgtcagaagcaggtgaagtacctgggctatctgctgaaggagggccagagatggctgacagaggccaggaaggagacagtgatgggccagccaacacccaagaccccaagacagctgagggagttcctgggcaaagcaggattttgcaggctgttcatcccaggattcgcagagatggcagcacctctgtacccactgaccaagccgggcaccctgtttaattggggccctgaccagcagaaggcctatcaggagatcaagcaggccctgctgacagcaccagccctgggcctgccagacctgaccaagcctttcgagctgtttgtggatgagaagcagggctacgccaagggcgtgctgacccagaagctgggaccatggagacggcccgtggcctatctgtccaagaagctggacccagtggcagcaggatggccaccatgcctgaggatggtggcagcaatcgccgtgctgacaaaggatgccggcaagctgaccatgggacagccactggtcatcctggcaccacacgcagtggaggccctggtgaagcagcctccagatcgctggctgtctaacgcccggatgacacactaccaggccctgctgctggacaccgatcgcgtgcagtttggccctgtggtggccctgaatccagccaccctgctgcctctgccagaggagggcctgcagcacaactgtctggacatcctggcagaggcacacggaacaaggccagacctgaccgatcagcccctgcctgacgccgatcacacatggtataccgatggaagctccctgctgcaggagggccagaggaaggcaggagcagcagtgaccacagagacagaagtgatctgggccaaggccctgccagcaggcacatccgcccagcgggccgagctgatcgccctgacccaggccctgaagatggccgagggcaagaagctgaacgtgtacacagactccagatatgccttcgccaccgcacacatccacggagagatctacaggcgccggggctggctgacctctgagggcaaggagatcaagaacaaggatgagatcctggccctgctgaaggccctgtttctgcccaagcggctgagcatcatccactgtcctggacaccagaagggacactccgccgaggcaaggggcaatcggatggccgaccaggccgccagaaaggctgctattactgaaactcccgacacttccactctgctgattgaaaactcctccccttctggcggctcaaaaagaaccgccgacggcagcgaattcgagtctcccaagaagaagaggaaagtcggctctggccctgccgctaagagagtgaagctggactgagctggagcctcggtggccatgcttcttgccccttgggcctccccccagcccctcctccccttcctgcacccgtacccccgtggtctttgaataaagtctgagtgggcggcaatcaacctctggattacaaaatttgtgaaagattgactgatattcttaactatgttgctccttttacgctgtgtggatatgctgctttaatgcctctgtatcatgctattgcttcccgtacggctttcgttttctcctccttgtataaatcctggttgctgtctctttatgaggagttgtggcccgttgtccgtcaacgtggcgtggtgtgctctgtgtttgctgacgcaacccccactggctggggcattgccaccacctgtcaactcctttctgggactttcgctttccccctcccgatcgccacggcagaactcatcgccgcctgccttgcccgctgctggacaggggctaggttgctgggcactgataattccgtggtgttgtcggggaagctgacgtcctttccagggctgctcgcctgtgttgccaactggatcctgcgcgggacgtccttctgctacgtcccttcggctctcaatccagcggacctcccttcccgaggccttctgccggttctgcggcctctcccgcgtcttcgctttcggcctccgacgagtcggatctccctttgggccgcctccccgcctgaaaaaaaaaaaaaaaaaaaaaaaaaaaaaaaaaaaaaaaaaaaaaaaaaaaaaaaaaaaaaaaaaaaaaaaaaaaaaaaaaaaaaaaaaaaaaaaaaaaaaaaaaaaaaaaaaaaaaaaa

SEQ ID NO: 225 - RNA, 7275 nt, synthetic construct
  source 1..7275: mol_type = other RNA
aggaaataagagagaaaagaagagtaagaagaaatataagagccaccatgaaacggacagccgacggaagcgagttcgagtcaccaaagaagaagcggaaagtcgacaagaagtacagcatcggcctggacatcggcaccaactctgtgggctgggccgtgatcaccgacgagtacaaggtgcccagcaagaaattcaaggtgctgggcaacaccgaccggcacagcatcaagaagaacctgatcggagccctgctgttcgacagcggcgaaacagccgaggccacccggctgaagagaaccgccagaagaagatacaccagacggaagaaccggatctgctatctgcaagagatcttcagcaacgagatggccaaggtggacgacagcttcttccacagactggaagagtccttcctggtggaagaggataagaagcacgagcggcaccccatcttcggcaacatcgtggacgaggtggcctaccacgagaagtaccccaccatctaccacctgagaaagaaactggtggacagcaccgacaaggccgacctgcggctgatctatctggccctggcccacatgatcaagttccggggccacttcctgatcgagggcgacctgaaccccgacaacagcgacgtggacaagctgttcatccagctggtgcagacctacaaccagctgttcgaggaaaaccccatcaacgccagcggcgtggacgccaaggccatcctgtctgccagactgagcaagagcagaaagctggaaaatctgatcgcccagctgcccggcgagaagaagaatggcctgttcggaaacctgattgccctgagcctgggcctgacccccaacttcaagagcaacttcgacctggccgaggatgccaaactgcagctgagcaaggacacctacgacgacgacctggacaacctgctggcccagatcggcgaccagtacgccgacctgtttctggccgccaagaacctgtccgacgccatcctgctgagcgacatcctgagagtgaacaccgagatcaccaaggcccccctgagcgcctctatgatcaagagatacgacgagcaccaccaggacctgaccctgctgaaagctctcgtgcggcagcagctgcctgagaagtacaaagagattttcttcgaccagagcaagaacggctacgccggctacattgacggcggagccagccaggaagagttctacaagttcatcaagcccatcctggaaaagatggacggcaccgaggaactgctcgtgaagctgaagagagaggacctgctgcggaagcagcggaccttcgacaacggcagcatcccccaccagatccacctgggagagctgcacgccattctgcggcggcaggaagatttttacccattcctgaaggacaaccgggaaaagatcgagaagatcctgaccttccgcatcccctactacgtgggccctctggccaggggaaacagcagattcgcctggatgaccagaaagagcgaggaaaccatcaccccctggaacttcgaggaagtggtggacaagggcgcttccgcccagagcttcatcgagcggatgaccaacttcgataagaacctgcccaacgagaaggtgctgcccaagcacagcctgctgtacgagtacttcaccgtgtataacgagctgaccaaagtgaaatacgtgaccgagggaatgagaaagcccgccttcctgagcggcgagcagaaaaaggccatcgtggacctgctgttcaagaccaaccggaaagtgaccgtgaagcagctgaaagaggactacttcaagaaaatcgagtgcttcgactccgtggaaatctccggcgtggaagatcggttcaacgcctccctgggcacataccacgatctgctgaaaattatcaaggacaaggacttcctggacaatgaggaaaacgaggacattctggaagatatcgtgctgaccctgacactgtttgaggacagagagatgatcgaggaacggctgaaaacctatgcccacctgttcgacgacaaagtgatgaagcagctgaagcggcggagatacaccggctggggcaggctgagccggaagctgatcaacggcatccgggacaagcagtccggcaagacaatcctggatttcctgaagtccgacggcttcgccaacagaaacttcatgcagctgatccacgacgacagcctgacctttaaagaggacatccagaaagcccaggtgtccggccagggcgatagcctgcacgagcacattgccaatctggccggcagccccgccattaagaagggcatcctgcagacagtgaaggtggtggacgagctcgtgaaagtgatgggccggcacaagcccgagaacatcgtgatcgaaatggccagagagaaccagaccacccagaagggacagaagaacagccgcgagagaatgaagcggatcgaagagggcatcaaagagctgggcagccagatcctgaaagaacaccccgtggaaaacacccagctgcagaacgagaagctgtacctgtactacctgcagaatgggcgggatatgtacgtggaccaggaactggacatcaaccggctgtccgactacgatgtggacgctatcgtgcctcagagctttctgaaggacgactccatcgacaacaaggtgctgaccagaagcgacaagaaccggggcaagagcgacaacgtgccctccgaagaggtcgtgaagaagatgaagaactactggcggcagctgctgaacgccaagctgattacccagagaaagttcgacaatctgaccaaggccgagagaggcggcctgagcgaactggataaggccggcttcatcaagagacagctggtggaaacccggcagatcacaaagcacgtggcacagatcctggactcccggatgaacactaagtacgacgagaatgacaagctgatccgggaagtgaaagtgatcaccctgaagtccaagctggtgtccgatttccggaaggatttccagttttacaaagtgcgcgagatcaacaactaccaccacgcccacgacgcctacctgaacgccgtcgtgggaaccgccctgatcaaaaagtaccctaagctggaaagcgagttcgtgtacggcgactacaaggtgtacgacgtgcggaagatgatcgccaagagcgagcaggaaatcggcaaggctaccgccaagtacttcttctacagcaacatcatgaactttttcaagaccgagattaccctggccaacggcgagatccggaagcggcctctgatcgagacaaacggcgaaaccggggagatcgtgtgggataagggccgggattttgccaccgtgcggaaagtgctgagcatgccccaagtgaatatcgtgaaaaagaccgaggtgcagacaggcggcttcagcaaagagtctatcctgcccaagaggaacagcgataagctgatcgccagaaagaaggactgggaccctaagaagtacggcggcttcgacagccccaccgtggcctattctgtgctggtggtggccaaagtggaaaagggcaagtccaagaaactgaagagtgtgaaagagctgctggggatcaccatcatggaaagaagcagcttcgagaagaatcccatcgactttctggaagccaagggctacaaagaagtgaaaaaggacctgatcatcaagctgcctaagtactccctgttcgagctggaaaacggccggaagagaatgctggcctctgccggcgaactgcagaagggaaacgaactggccctgccctccaaatatgtgaacttcctgtacctggccagccactatgagaagctgaagggctcccccgaggataatgagcagaaacagctgtttgtggaacagcacaagcactacctggacgagatcatcgagcagatcagcgagttctccaagagagtgatcctggccgacgctaatctggacaaagtgctgtccgcctacaacaagcaccgggataagcccatcagagagcaggccgagaatatcatccacctgtttaccctgaccaatctgggagcccctgccgccttcaagtactttgacaccaccatcgaccggaagaggtacaccagcaccaaagaggtgctggacgccaccctgatccaccagagcatcaccggcctgtacgagacacggatcgacctgtctcagctgggaggtgactccggcggaagctctggtggcagcaagcggaccgccgacggctctgaattcgagagccctaagaagaaaagaaaggtgagcggaggctctagcggcggaagcaccctgaacattgaagacgagtatagactgcatgaaacaagcaaggaacccgacgtgtccctgggctccacctggctgtccgactttccccaggcctgggccgagacaggaggaatgggcctggccgtgcggcaggcacccctgatcatccctctgaaggccacctctacacccgtgagcatcaagcagtaccctatgtctcaggaggccagactgggcatcaagcctcacatccagaggctgctggaccagggcatcctggtgccatgccagagcccctggaacacaccactgctgcccgtgaagaagccaggcaccaatgactatagacccgtgcaggatctgagagaggtgaacaagagggtggaggatatccaccccaccgtgcccaacccttacaatctgctgtccggcctgcccccttctcaccagtggtatacagtgctggacctgaaggatgccttcttttgtctgagactgcaccctaccagccagccactgttcgcctttgagtggagggaccctgagatgggcatctctggccagctgacctggacacgcctgcctcagggcttcaagaatagcccaacactgtttaacgaggccctgcaccgcgacctggcagatttccggatccagcacccagatctgatcctgctgcagtacgtggacgatctgctgctggccgccaccagcgagctggattgccagcagggaacacgcgccctgctgcagaccctgggaaacctgggatatagggcatccgccaagaaggcccagatctgtcagaagcaggtgaagtacctgggctatctgctgaaggagggccagagatggctgacagaggccaggaaggagacagtgatgggccagccaacacccaagaccccaagacagctgagggagttcctgggcaaagcaggattttgcaggctgttcatcccaggattcgcagagatggcagcacctctgtacccactgaccaagccgggcaccctgtttaattggggccctgaccagcagaaggcctatcaggagatcaagcaggccctgctgacagcaccagccctgggcctgccagacctgaccaagcctttcgagctgtttgtggatgagaagcagggctacgccaagggcgtgctgacccagaagctgggaccatggagacggcccgtggcctatctgtccaagaagctggacccagtggcagcaggatggccaccatgcctgaggatggtggcagcaatcgccgtgctgacaaaggatgccggcaagctgaccatgggacagccactggtcatcctggcaccacacgcagtggaggccctggtgaagcagcctccagatcgctggctgtctaacgcccggatgacacactaccaggccctgctgctggacaccgatcgcgtgcagtttggccctgtggtggccctgaatccagccaccctgctgcctctgccagaggagggcctgcagcacaactgtctggacatcctggcagaggcacacggaacaaggccagacctgaccgatcagcccctgcctgacgccgatcacacatggtataccgatggaagctccctgctgcaggagggccagaggaaggcaggagcagcagtgaccacagagacagaagtgatctgggccaaggccctgccagcaggcacatccgcccagcgggccgagctgatcgccctgacccaggccctgaagatggccgagggcaagaagctgaacgtgtacacagactccagatatgccttcgccaccgcacacatccacggagagatctacaggcgccggggctggctgacctctgagggcaaggagatcaagaacaaggatgagatcctggccctgctgaaggccctgtttctgcccaagcggctgagcatcatccactgtcctggacaccagaagggacactccgccgaggcaaggggcaatcggatggccgaccaggccgccagaaaggctgctattactgaaactcccgacacttccactctgctgattgaaaactcctccccttctggcggctcaaaaagaaccgccgacggcagcgaattcgagtctcccaagaagaagaggaaagtcggctctggccctgccgctaagagagtgaagctggactgagctggagcctcggtggccatgcttcttgccccttgggcctccccccagcccctcctccccttcctgcacccgtacccccgtggtctttgaataaagtctgagtgggcggcaatcaacctctggattacaaaatttgtgaaagattgactgatattcttaactatgttgctccttttacgctgtgtggatatgctgctttaatgcctctgtatcatgctattgcttcccgtacggctttcgttttctcctccttgtataaatcctggttgctgtctctttatgaggagttgtggcccgttgtccgtcaacgtggcgtggtgtgctctgtgtttgctgacgcaacccccactggctggggcattgccaccacctgtcaactcctttctgggactttcgctttccccctcccgatcgccacggcagaactcatcgccgcctgccttgcccgctgctggacaggggctaggttgctgggcactgataattccgtggtgttgtcggggaagctgacgtcctttccagggctgctcgcctgtgttgccaactggatcctgcgcgggacgtccttctgctacgtcccttcggctctcaatccagcggacctcccttcccgaggccttctgccggttctgcggcctctcccgcgtcttcgctttcggcctccgacgagtcggatctccctttgggccgcctccccgcctgaaaaaaaaaaaaaaaaaaaaaaaaaaaaaaaaaaaaaaaaaaaaaaaaaaaaaaaaaaaaaaaaaaaaaaaaaaaaaaaaaaaaaaaaaaaaaaaaaaaaaaaaaaaaaaaaaaaaaaaaaaaaaaaaaa

SEQ ID NO: 226 - RNA, 6629 nt, synthetic construct
  source 1..6629: mol_type = other RNA
aggaaataagagagaaaagaagagtaagaagaaatataagagccaccatgaaacggacagccgacggaagcgagttcgagtcaccaaagaagaagcggaaagtcgacaagaagtacagcatcggcctggacatcggcaccaactctgtgggctgggccgtgatcaccgacgagtacaaggtgcccagcaagaaattcaaggtgctgggcaacaccgaccggcacagcatcaagaagaacctgatcggagccctgctgttcgacagcggcgaaacagccgaggccacccggctgaagagaaccgccagaagaagatacaccagacggaagaaccggatctgctatctgcaagagatcttcagcaacgagatggccaaggtggacgacagcttcttccacagactggaagagtccttcctggtggaagaggataagaagcacgagcggcaccccatcttcggcaacatcgtggacgaggtggcctaccacgagaagtaccccaccatctaccacctgagaaagaaactggtggacagcaccgacaaggccgacctgcggctgatctatctggccctggcccacatgatcaagttccggggccacttcctgatcgagggcgacctgaaccccgacaacagcgacgtggacaagctgttcatccagctggtgcagacctacaaccagctgttcgaggaaaaccccatcaacgccagcggcgtggacgccaaggccatcctgtctgccagactgagcaagagcagaaagctggaaaatctgatcgcccagctgcccggcgagaagaagaatggcctgttcggaaacctgattgccctgagcctgggcctgacccccaacttcaagagcaacttcgacctggccgaggatgccaaactgcagctgagcaaggacacctacgacgacgacctggacaacctgctggcccagatcggcgaccagtacgccgacctgtttctggccgccaagaacctgtccgacgccatcctgctgagcgacatcctgagagtgaacaccgagatcaccaaggcccccctgagcgcctctatgatcaagagatacgacgagcaccaccaggacctgaccctgctgaaagctctcgtgcggcagcagctgcctgagaagtacaaagagattttcttcgaccagagcaagaacggctacgccggctacattgacggcggagccagccaggaagagttctacaagttcatcaagcccatcctggaaaagatggacggcaccgaggaactgctcgtgaagctgaagagagaggacctgctgcggaagcagcggaccttcgacaacggcagcatcccccaccagatccacctgggagagctgcacgccattctgcggcggcaggaagatttttacccattcctgaaggacaaccgggaaaagatcgagaagatcctgaccttccgcatcccctactacgtgggccctctggccaggggaaacagcagattcgcctggatgaccagaaagagcgaggaaaccatcaccccctggaacttcgaggaagtggtggacaagggcgcttccgcccagagcttcatcgagcggatgaccaacttcgataagaacctgcccaacgagaaggtgctgcccaagcacagcctgctgtacgagtacttcaccgtgtataacgagctgaccaaagtgaaatacgtgaccgagggaatgagaaagcccgccttcctgagcggcgagcagaaaaaggccatcgtggacctgctgttcaagaccaaccggaaagtgaccgtgaagcagctgaaagaggactacttcaagaaaatcgagtgcttcgactccgtggaaatctccggcgtggaagatcggttcaacgcctccctgggcacataccacgatctgctgaaaattatcaaggacaaggacttcctggacaatgaggaaaacgaggacattctggaagatatcgtgctgaccctgacactgtttgaggacagagagatgatcgaggaacggctgaaaacctatgcccacctgttcgacgacaaagtgatgaagcagctgaagcggcggagatacaccggctggggcaggctgagccggaagctgatcaacggcatccgggacaagcagtccggcaagacaatcctggatttcctgaagtccgacggcttcgccaacagaaacttcatgcagctgatccacgacgacagcctgacctttaaagaggacatccagaaagcccaggtgtccggccagggcgatagcctgcacgagcacattgccaatctggccggcagccccgccattaagaagggcatcctgcagacagtgaaggtggtggacgagctcgtgaaagtgatgggccggcacaagcccgagaacatcgtgatcgaaatggccagagagaaccagaccacccagaagggacagaagaacagccgcgagagaatgaagcggatcgaagagggcatcaaagagctgggcagccagatcctgaaagaacaccccgtggaaaacacccagctgcagaacgagaagctgtacctgtactacctgcagaatgggcgggatatgtacgtggaccaggaactggacatcaaccggctgtccgactacgatgtggacgctatcgtgcctcagagctttctgaaggacgactccatcgacaacaaggtgctgaccagaagcgacaagaaccggggcaagagcgacaacgtgccctccgaagaggtcgtgaagaagatgaagaactactggcggcagctgctgaacgccaagctgattacccagagaaagttcgacaatctgaccaaggccgagagaggcggcctgagcgaactggataaggccggcttcatcaagagacagctggtggaaacccggcagatcacaaagcacgtggcacagatcctggactcccggatgaacactaagtacgacgagaatgacaagctgatccgggaagtgaaagtgatcaccctgaagtccaagctggtgtccgatttccggaaggatttccagttttacaaagtgcgcgagatcaacaactaccaccacgcccacgacgcctacctgaacgccgtcgtgggaaccgccctgatcaaaaagtaccctaagctggaaagcgagttcgtgtacggcgactacaaggtgtacgacgtgcggaagatgatcgccaagagcgagcaggaaatcggcaaggctaccgccaagtacttcttctacagcaacatcatgaactttttcaagaccgagattaccctggccaacggcgagatccggaagcggcctctgatcgagacaaacggcgaaaccggggagatcgtgtgggataagggccgggattttgccaccgtgcggaaagtgctgagcatgccccaagtgaatatcgtgaaaaagaccgaggtgcagacaggcggcttcagcaaagagtctatcctgcccaagaggaacagcgataagctgatcgccagaaagaaggactgggaccctaagaagtacggcggcttcgacagccccaccgtggcctattctgtgctggtggtggccaaagtggaaaagggcaagtccaagaaactgaagagtgtgaaagagctgctggggatcaccatcatggaaagaagcagcttcgagaagaatcccatcgactttctggaagccaagggctacaaagaagtgaaaaaggacctgatcatcaagctgcctaagtactccctgttcgagctggaaaacggccggaagagaatgctggcctctgccggcgaactgcagaagggaaacgaactggccctgccctccaaatatgtgaacttcctgtacctggccagccactatgagaagctgaagggctcccccgaggataatgagcagaaacagctgtttgtggaacagcacaagcactacctggacgagatcatcgagcagatcagcgagttctccaagagagtgatcctggccgacgctaatctggacaaagtgctgtccgcctacaacaagcaccgggataagcccatcagagagcaggccgagaatatcatccacctgtttaccctgaccaatctgggagcccctgccgccttcaagtactttgacaccaccatcgaccggaagaggtacaccagcaccaaagaggtgctggacgccaccctgatccaccagagcatcaccggcctgtacgagacacggatcgacctgtctcagctgggaggtgactccggcggaagctctggtggcagcaagcggaccgccgacggctctgaattcgagagccctaagaagaaaagaaaggtgagcggaggctctagcggcggaagcaccctgaacattgaagacgagtatagactgcatgaaacaagcaaggaacccgacgtgtccctgggctccacctggctgtccgactttccccaggcctgggccgagacaggaggaatgggcctggccgtgcggcaggcacccctgatcatccctctgaaggccacctctacacccgtgagcatcaagcagtaccctatgtctcaggaggccagactgggcatcaagcctcacatccagaggctgctggaccagggcatcctggtgccatgccagagcccctggaacacaccactgctgcccgtgaagaagccaggcaccaatgactatagacccgtgcaggatctgagagaggtgaacaagagggtggaggatatccaccccaccgtgcccaacccttacaatctgctgtccggcctgcccccttctcaccagtggtatacagtgctggacctgaaggatgccttcttttgtctgagactgcaccctaccagccagccactgttcgcctttgagtggagggaccctgagatgggcatctctggccagctgacctggacacgcctgcctcagggcttcaagaatagcccaacactgtttaacgaggccctgcaccgcgacctggcagatttccggatccagcacccagatctgatcctgctgcagtacgtggacgatctgctgctggccgccaccagcgagctggattgccagcagggaacacgcgccctgctgcagaccctgggaaacctgggatatagggcatccgccaagaaggcccagatctgtcagaagcaggtgaagtacctgggctatctgctgaaggagggccagagatggctgacagaggccaggaaggagacagtgatgggccagccaacacccaagaccccaagacagctgagggagttcctgggcaaagcaggattttgcaggctgttcatcccaggattcgcagagatggcagcacctctgtacccactgaccaagccgggcaccctgtttaattggggccctgaccagcagaaggcctatcaggagatcaagcaggccctgctgacagcaccagccctgggcctgccagacctgaccaagcctttcgagctgtttgtggatgagaagcagggctacgccaagggcgtgctgacccagaagctgggaccatggagacggcccgtggcctatctgtccaagaagctggacccagtggcagcaggatggccaccatgcctgaggatggtggcagcaatcgccgtgctgacaaaggatgccggcaagctgaccatgggacagccactggtcatcctggcaccacacgcagtggaggccctggtgaagcagcctccagatcgctggctgtctaacgcccggatgacacactaccaggccctgctgctggacaccgatcgcgtgcagtttggccctgtggtggccctgaatccagccaccctgctgcctctgccagaggagggcctgcagcacaactgtctggacatcctggcagaggcacacggaacaaggccagacctgaccgatcagcccctgcctgacgccgatcacacatggtataccgatggaagctccctgctgcaggagggccagaggaaggcaggagcagcagtgaccacagagacagaagtgatctgggccaaggccctgccagcaggcacatccgcccagcgggccgagctgatcgccctgacccaggccctgaagatggccgagggcaagaagctgaacgtgtacacagactccagatatgccttcgccaccgcacacatccacggagagatctacaggcgccggggctggctgacctctgagggcaaggagatcaagaacaaggatgagatcctggccctgctgaaggccctgtttctgcccaagcggctgagcatcatccactgtcctggacaccagaagggacactccgccgaggcaaggggcaatcggatggccgaccaggccgccagaaaggctgctattactgaaactcccgacacttccactctgctgattgaaaactcctccccttctggcggctcaaaaagaaccgccgacggcagcgaattcgagtctcccaagaagaagaggaaagtcggctctggccctgccgctaagagagtgaagctggactgagctggagcctcggtggccatgcttcttgccccttgggcctccccccagcccctcctccccttcctgcacccgtacccccgtggtctttgaataaagtctgagtgggcggcgtcatgaaggtttttcttttcctgagaaaacaagaaattgttttctcaggttttgctttttgaaaaaaaagcaaaa

SEQ ID NO: 227 - RNA, 6858 nt, synthetic construct
  source 1..6858: mol_type = other RNA
aggaaataagagagaaaagaagagtaagaagaaatataagagccaccatgaaacggacagccgacggaagcgagttcgagtcaccaaagaagaagcggaaagtcgacaagaagtacagcatcggcctggacatcggcaccaactctgtgggctgggccgtgatcaccgacgagtacaaggtgcccagcaagaaattcaaggtgctgggcaacaccgaccggcacagcatcaagaagaacctgatcggagccctgctgttcgacagcggcgaaacagccgaggccacccggctgaagagaaccgccagaagaagatacaccagacggaagaaccggatctgctatctgcaagagatcttcagcaacgagatggccaaggtggacgacagcttcttccacagactggaagagtccttcctggtggaagaggataagaagcacgagcggcaccccatcttcggcaacatcgtggacgaggtggcctaccacgagaagtaccccaccatctaccacctgagaaagaaactggtggacagcaccgacaaggccgacctgcggctgatctatctggccctggcccacatgatcaagttccggggccacttcctgatcgagggcgacctgaaccccgacaacagcgacgtggacaagctgttcatccagctggtgcagacctacaaccagctgttcgaggaaaaccccatcaacgccagcggcgtggacgccaaggccatcctgtctgccagactgagcaagagcagaaagctggaaaatctgatcgcccagctgcccggcgagaagaagaatggcctgttcggaaacctgattgccctgagcctgggcctgacccccaacttcaagagcaacttcgacctggccgaggatgccaaactgcagctgagcaaggacacctacgacgacgacctggacaacctgctggcccagatcggcgaccagtacgccgacctgtttctggccgccaagaacctgtccgacgccatcctgctgagcgacatcctgagagtgaacaccgagatcaccaaggcccccctgagcgcctctatgatcaagagatacgacgagcaccaccaggacctgaccctgctgaaagctctcgtgcggcagcagctgcctgagaagtacaaagagattttcttcgaccagagcaagaacggctacgccggctacattgacggcggagccagccaggaagagttctacaagttcatcaagcccatcctggaaaagatggacggcaccgaggaactgctcgtgaagctgaagagagaggacctgctgcggaagcagcggaccttcgacaacggcagcatcccccaccagatccacctgggagagctgcacgccattctgcggcggcaggaagatttttacccattcctgaaggacaaccgggaaaagatcgagaagatcctgaccttccgcatcccctactacgtgggccctctggccaggggaaacagcagattcgcctggatgaccagaaagagcgaggaaaccatcaccccctggaacttcgaggaagtggtggacaagggcgcttccgcccagagcttcatcgagcggatgaccaacttcgataagaacctgcccaacgagaaggtgctgcccaagcacagcctgctgtacgagtacttcaccgtgtataacgagctgaccaaagtgaaatacgtgaccgagggaatgagaaagcccgccttcctgagcggcgagcagaaaaaggccatcgtggacctgctgttcaagaccaaccggaaagtgaccgtgaagcagctgaaagaggactacttcaagaaaatcgagtgcttcgactccgtggaaatctccggcgtggaagatcggttcaacgcctccctgggcacataccacgatctgctgaaaattatcaaggacaaggacttcctggacaatgaggaaaacgaggacattctggaagatatcgtgctgaccctgacactgtttgaggacagagagatgatcgaggaacggctgaaaacctatgcccacctgttcgacgacaaagtgatgaagcagctgaagcggcggagatacaccggctggggcaggctgagccggaagctgatcaacggcatccgggacaagcagtccggcaagacaatcctggatttcctgaagtccgacggcttcgccaacagaaacttcatgcagctgatccacgacgacagcctgacctttaaagaggacatccagaaagcccaggtgtccggccagggcgatagcctgcacgagcacattgccaatctggccggcagccccgccattaagaagggcatcctgcagacagtgaaggtggtggacgagctcgtgaaagtgatgggccggcacaagcccgagaacatcgtgatcgaaatggccagagagaaccagaccacccagaagggacagaagaacagccgcgagagaatgaagcggatcgaagagggcatcaaagagctgggcagccagatcctgaaagaacaccccgtggaaaacacccagctgcagaacgagaagctgtacctgtactacctgcagaatgggcgggatatgtacgtggaccaggaactggacatcaaccggctgtccgactacgatgtggacgctatcgtgcctcagagctttctgaaggacgactccatcgacaacaaggtgctgaccagaagcgacaagaaccggggcaagagcgacaacgtgccctccgaagaggtcgtgaagaagatgaagaactactggcggcagctgctgaacgccaagctgattacccagagaaagttcgacaatctgaccaaggccgagagaggcggcctgagcgaactggataaggccggcttcatcaagagacagctggtggaaacccggcagatcacaaagcacgtggcacagatcctggactcccggatgaacactaagtacgacgagaatgacaagctgatccgggaagtgaaagtgatcaccctgaagtccaagctggtgtccgatttccggaaggatttccagttttacaaagtgcgcgagatcaacaactaccaccacgcccacgacgcctacctgaacgccgtcgtgggaaccgccctgatcaaaaagtaccctaagctggaaagcgagttcgtgtacggcgactacaaggtgtacgacgtgcggaagatgatcgccaagagcgagcaggaaatcggcaaggctaccgccaagtacttcttctacagcaacatcatgaactttttcaagaccgagattaccctggccaacggcgagatccggaagcggcctctgatcgagacaaacggcgaaaccggggagatcgtgtgggataagggccgggattttgccaccgtgcggaaagtgctgagcatgccccaagtgaatatcgtgaaaaagaccgaggtgcagacaggcggcttcagcaaagagtctatcctgcccaagaggaacagcgataagctgatcgccagaaagaaggactgggaccctaagaagtacggcggcttcgacagccccaccgtggcctattctgtgctggtggtggccaaagtggaaaagggcaagtccaagaaactgaagagtgtgaaagagctgctggggatcaccatcatggaaagaagcagcttcgagaagaatcccatcgactttctggaagccaagggctacaaagaagtgaaaaaggacctgatcatcaagctgcctaagtactccctgttcgagctggaaaacggccggaagagaatgctggcctctgccggcgaactgcagaagggaaacgaactggccctgccctccaaatatgtgaacttcctgtacctggccagccactatgagaagctgaagggctcccccgaggataatgagcagaaacagctgtttgtggaacagcacaagcactacctggacgagatcatcgagcagatcagcgagttctccaagagagtgatcctggccgacgctaatctggacaaagtgctgtccgcctacaacaagcaccgggataagcccatcagagagcaggccgagaatatcatccacctgtttaccctgaccaatctgggagcccctgccgccttcaagtactttgacaccaccatcgaccggaagaggtacaccagcaccaaagaggtgctggacgccaccctgatccaccagagcatcaccggcctgtacgagacacggatcgacctgtctcagctgggaggtgactccggcggaagctctggtggcagcaagcggaccgccgacggctctgaattcgagagccctaagaagaaaagaaaggtgagcggaggctctagcggcggaagcaccctgaacattgaagacgagtatagactgcatgaaacaagcaaggaacccgacgtgtccctgggctccacctggctgtccgactttccccaggcctgggccgagacaggaggaatgggcctggccgtgcggcaggcacccctgatcatccctctgaaggccacctctacacccgtgagcatcaagcagtaccctatgtctcaggaggccagactgggcatcaagcctcacatccagaggctgctggaccagggcatcctggtgccatgccagagcccctggaacacaccactgctgcccgtgaagaagccaggcaccaatgactatagacccgtgcaggatctgagagaggtgaacaagagggtggaggatatccaccccaccgtgcccaacccttacaatctgctgtccggcctgcccccttctcaccagtggtatacagtgctggacctgaaggatgccttcttttgtctgagactgcaccctaccagccagccactgttcgcctttgagtggagggaccctgagatgggcatctctggccagctgacctggacacgcctgcctcagggcttcaagaatagcccaacactgtttaacgaggccctgcaccgcgacctggcagatttccggatccagcacccagatctgatcctgctgcagtacgtggacgatctgctgctggccgccaccagcgagctggattgccagcagggaacacgcgccctgctgcagaccctgggaaacctgggatatagggcatccgccaagaaggcccagatctgtcagaagcaggtgaagtacctgggctatctgctgaaggagggccagagatggctgacagaggccaggaaggagacagtgatgggccagccaacacccaagaccccaagacagctgagggagttcctgggcaaagcaggattttgcaggctgttcatcccaggattcgcagagatggcagcacctctgtacccactgaccaagccgggcaccctgtttaattggggccctgaccagcagaaggcctatcaggagatcaagcaggccctgctgacagcaccagccctgggcctgccagacctgaccaagcctttcgagctgtttgtggatgagaagcagggctacgccaagggcgtgctgacccagaagctgggaccatggagacggcccgtggcctatctgtccaagaagctggacccagtggcagcaggatggccaccatgcctgaggatggtggcagcaatcgccgtgctgacaaaggatgccggcaagctgaccatgggacagccactggtcatcctggcaccacacgcagtggaggccctggtgaagcagcctccagatcgctggctgtctaacgcccggatgacacactaccaggccctgctgctggacaccgatcgcgtgcagtttggccctgtggtggccctgaatccagccaccctgctgcctctgccagaggagggcctgcagcacaactgtctggacatcctggcagaggcacacggaacaaggccagacctgaccgatcagcccctgcctgacgccgatcacacatggtataccgatggaagctccctgctgcaggagggccagaggaaggcaggagcagcagtgaccacagagacagaagtgatctgggccaaggccctgccagcaggcacatccgcccagcgggccgagctgatcgccctgacccaggccctgaagatggccgagggcaagaagctgaacgtgtacacagactccagatatgccttcgccaccgcacacatccacggagagatctacaggcgccggggctggctgacctctgagggcaaggagatcaagaacaaggatgagatcctggccctgctgaaggccctgtttctgcccaagcggctgagcatcatccactgtcctggacaccagaagggacactccgccgaggcaaggggcaatcggatggccgaccaggccgccagaaaggctgctattactgaaactcccgacacttccactctgctgattgaaaactcctccccttctggcggctcaaaaagaaccgccgacggcagcgaattcgagtctcccaagaagaagaggaaagtcggctctggccctgccgctaagagagtgaagctggactgagctggagcctcggtggccatgcttcttgccccttgggcctccccccagcccctcctccccttcctgcacccgtacccccgtggtctttgaataaagtctgagtgggcggccactcctccatggtgatataaagaccacccacttccttcgggtgagcccctaagccatggttgtactgcactatcatcctaagacggtccttcttcggatcgcaatctcaccctggtgccgcgcttccttcgggaactgcacccgcggaccagggccgtctttgaacttttctaactgttcttacaaaaaaaaaaaaaaaaaaaaaaaaaaaaaaaaaaaaaaaaaaaaaaaaaaaaaaaaaaaaaaaaaaaaaaaaaaaaaaaaaaaaaaaaaaaaaaaaaaaaaaaaaaaaaaaaaaaaaaaa

SEQ ID NO: 228 - RNA, 6868 nt, synthetic construct
  source 1..6868: mol_type = other RNA
aggaaataagagagaaaagaagagtaagaagaaatataagagccaccatgaaacggacagccgacggaagcgagttcgagtcaccaaagaagaagcggaaagtcgacaagaagtacagcatcggcctggacatcggcaccaactctgtgggctgggccgtgatcaccgacgagtacaaggtgcccagcaagaaattcaaggtgctgggcaacaccgaccggcacagcatcaagaagaacctgatcggagccctgctgttcgacagcggcgaaacagccgaggccacccggctgaagagaaccgccagaagaagatacaccagacggaagaaccggatctgctatctgcaagagatcttcagcaacgagatggccaaggtggacgacagcttcttccacagactggaagagtccttcctggtggaagaggataagaagcacgagcggcaccccatcttcggcaacatcgtggacgaggtggcctaccacgagaagtaccccaccatctaccacctgagaaagaaactggtggacagcaccgacaaggccgacctgcggctgatctatctggccctggcccacatgatcaagttccggggccacttcctgatcgagggcgacctgaaccccgacaacagcgacgtggacaagctgttcatccagctggtgcagacctacaaccagctgttcgaggaaaaccccatcaacgccagcggcgtggacgccaaggccatcctgtctgccagactgagcaagagcagaaagctggaaaatctgatcgcccagctgcccggcgagaagaagaatggcctgttcggaaacctgattgccctgagcctgggcctgacccccaacttcaagagcaacttcgacctggccgaggatgccaaactgcagctgagcaaggacacctacgacgacgacctggacaacctgctggcccagatcggcgaccagtacgccgacctgtttctggccgccaagaacctgtccgacgccatcctgctgagcgacatcctgagagtgaacaccgagatcaccaaggcccccctgagcgcctctatgatcaagagatacgacgagcaccaccaggacctgaccctgctgaaagctctcgtgcggcagcagctgcctgagaagtacaaagagattttcttcgaccagagcaagaacggctacgccggctacattgacggcggagccagccaggaagagttctacaagttcatcaagcccatcctggaaaagatggacggcaccgaggaactgctcgtgaagctgaagagagaggacctgctgcggaagcagcggaccttcgacaacggcagcatcccccaccagatccacctgggagagctgcacgccattctgcggcggcaggaagatttttacccattcctgaaggacaaccgggaaaagatcgagaagatcctgaccttccgcatcccctactacgtgggccctctggccaggggaaacagcagattcgcctggatgaccagaaagagcgaggaaaccatcaccccctggaacttcgaggaagtggtggacaagggcgcttccgcccagagcttcatcgagcggatgaccaacttcgataagaacctgcccaacgagaaggtgctgcccaagcacagcctgctgtacgagtacttcaccgtgtataacgagctgaccaaagtgaaatacgtgaccgagggaatgagaaagcccgccttcctgagcggcgagcagaaaaaggccatcgtggacctgctgttcaagaccaaccggaaagtgaccgtgaagcagctgaaagaggactacttcaagaaaatcgagtgcttcgactccgtggaaatctccggcgtggaagatcggttcaacgcctccctgggcacataccacgatctgctgaaaattatcaaggacaaggacttcctggacaatgaggaaaacgaggacattctggaagatatcgtgctgaccctgacactgtttgaggacagagagatgatcgaggaacggctgaaaacctatgcccacctgttcgacgacaaagtgatgaagcagctgaagcggcggagatacaccggctggggcaggctgagccggaagctgatcaacggcatccgggacaagcagtccggcaagacaatcctggatttcctgaagtccgacggcttcgccaacagaaacttcatgcagctgatccacgacgacagcctgacctttaaagaggacatccagaaagcccaggtgtccggccagggcgatagcctgcacgagcacattgccaatctggccggcagccccgccattaagaagggcatcctgcagacagtgaaggtggtggacgagctcgtgaaagtgatgggccggcacaagcccgagaacatcgtgatcgaaatggccagagagaaccagaccacccagaagggacagaagaacagccgcgagagaatgaagcggatcgaagagggcatcaaagagctgggcagccagatcctgaaagaacaccccgtggaaaacacccagctgcagaacgagaagctgtacctgtactacctgcagaatgggcgggatatgtacgtggaccaggaactggacatcaaccggctgtccgactacgatgtggacgctatcgtgcctcagagctttctgaaggacgactccatcgacaacaaggtgctgaccagaagcgacaagaaccggggcaagagcgacaacgtgccctccgaagaggtcgtgaagaagatgaagaactactggcggcagctgctgaacgccaagctgattacccagagaaagttcgacaatctgaccaaggccgagagaggcggcctgagcgaactggataaggccggcttcatcaagagacagctggtggaaacccggcagatcacaaagcacgtggcacagatcctggactcccggatgaacactaagtacgacgagaatgacaagctgatccgggaagtgaaagtgatcaccctgaagtccaagctggtgtccgatttccggaaggatttccagttttacaaagtgcgcgagatcaacaactaccaccacgcccacgacgcctacctgaacgccgtcgtgggaaccgccctgatcaaaaagtaccctaagctggaaagcgagttcgtgtacggcgactacaaggtgtacgacgtgcggaagatgatcgccaagagcgagcaggaaatcggcaaggctaccgccaagtacttcttctacagcaacatcatgaactttttcaagaccgagattaccctggccaacggcgagatccggaagcggcctctgatcgagacaaacggcgaaaccggggagatcgtgtgggataagggccgggattttgccaccgtgcggaaagtgctgagcatgccccaagtgaatatcgtgaaaaagaccgaggtgcagacaggcggcttcagcaaagagtctatcctgcccaagaggaacagcgataagctgatcgccagaaagaaggactgggaccctaagaagtacggcggcttcgacagccccaccgtggcctattctgtgctggtggtggccaaagtggaaaagggcaagtccaagaaactgaagagtgtgaaagagctgctggggatcaccatcatggaaagaagcagcttcgagaagaatcccatcgactttctggaagccaagggctacaaagaagtgaaaaaggacctgatcatcaagctgcctaagtactccctgttcgagctggaaaacggccggaagagaatgctggcctctgccggcgaactgcagaagggaaacgaactggccctgccctccaaatatgtgaacttcctgtacctggccagccactatgagaagctgaagggctcccccgaggataatgagcagaaacagctgtttgtggaacagcacaagcactacctggacgagatcatcgagcagatcagcgagttctccaagagagtgatcctggccgacgctaatctggacaaagtgctgtccgcctacaacaagcaccgggataagcccatcagagagcaggccgagaatatcatccacctgtttaccctgaccaatctgggagcccctgccgccttcaagtactttgacaccaccatcgaccggaagaggtacaccagcaccaaagaggtgctggacgccaccctgatccaccagagcatcaccggcctgtacgagacacggatcgacctgtctcagctgggaggtgactccggcggaagctctggtggcagcaagcggaccgccgacggctctgaattcgagagccctaagaagaaaagaaaggtgagcggaggctctagcggcggaagcaccctgaacattgaagacgagtatagactgcatgaaacaagcaaggaacccgacgtgtccctgggctccacctggctgtccgactttccccaggcctgggccgagacaggaggaatgggcctggccgtgcggcaggcacccctgatcatccctctgaaggccacctctacacccgtgagcatcaagcagtaccctatgtctcaggaggccagactgggcatcaagcctcacatccagaggctgctggaccagggcatcctggtgccatgccagagcccctggaacacaccactgctgcccgtgaagaagccaggcaccaatgactatagacccgtgcaggatctgagagaggtgaacaagagggtggaggatatccaccccaccgtgcccaacccttacaatctgctgtccggcctgcccccttctcaccagtggtatacagtgctggacctgaaggatgccttcttttgtctgagactgcaccctaccagccagccactgttcgcctttgagtggagggaccctgagatgggcatctctggccagctgacctggacacgcctgcctcagggcttcaagaatagcccaacactgtttaacgaggccctgcaccgcgacctggcagatttccggatccagcacccagatctgatcctgctgcagtacgtggacgatctgctgctggccgccaccagcgagctggattgccagcagggaacacgcgccctgctgcagaccctgggaaacctgggatatagggcatccgccaagaaggcccagatctgtcagaagcaggtgaagtacctgggctatctgctgaaggagggccagagatggctgacagaggccaggaaggagacagtgatgggccagccaacacccaagaccccaagacagctgagggagttcctgggcaaagcaggattttgcaggctgttcatcccaggattcgcagagatggcagcacctctgtacccactgaccaagccgggcaccctgtttaattggggccctgaccagcagaaggcctatcaggagatcaagcaggccctgctgacagcaccagccctgggcctgccagacctgaccaagcctttcgagctgtttgtggatgagaagcagggctacgccaagggcgtgctgacccagaagctgggaccatggagacggcccgtggcctatctgtccaagaagctggacccagtggcagcaggatggccaccatgcctgaggatggtggcagcaatcgccgtgctgacaaaggatgccggcaagctgaccatgggacagccactggtcatcctggcaccacacgcagtggaggccctggtgaagcagcctccagatcgctggctgtctaacgcccggatgacacactaccaggccctgctgctggacaccgatcgcgtgcagtttggccctgtggtggccctgaatccagccaccctgctgcctctgccagaggagggcctgcagcacaactgtctggacatcctggcagaggcacacggaacaaggccagacctgaccgatcagcccctgcctgacgccgatcacacatggtataccgatggaagctccctgctgcaggagggccagaggaaggcaggagcagcagtgaccacagagacagaagtgatctgggccaaggccctgccagcaggcacatccgcccagcgggccgagctgatcgccctgacccaggccctgaagatggccgagggcaagaagctgaacgtgtacacagactccagatatgccttcgccaccgcacacatccacggagagatctacaggcgccggggctggctgacctctgagggcaaggagatcaagaacaaggatgagatcctggccctgctgaaggccctgtttctgcccaagcggctgagcatcatccactgtcctggacaccagaagggacactccgccgaggcaaggggcaatcggatggccgaccaggccgccagaaaggctgctattactgaaactcccgacacttccactctgctgattgaaaactcctccccttctggcggctcaaaaagaaccgccgacggcagcgaattcgagtctcccaagaagaagaggaaagtcggctctggccctgccgctaagagagtgaagctggactgagctggagcctcggtggccatgcttcttgccccttgggcctccccccagcccctcctccccttcctgcacccgtacccccgtggtctttgaataaagtctgagtgggcggccactcctccatggtgatataaagaccacccacttccttcgggtgagcccctaagccatggttgtactgcactatcatcctaagacggtccttcttcggatcgcaatctcaccctggtgccgcgcttccttcgggaactgcacccgcggaccagggccgtctttgaacttttctaactgttcttacaaaaaaaaaaaaaaaaaaaaaaaaaaaaaaaaaaaaaaaaaaaaaaaaaaaaaaaaaaaaaaaaaaaaaaaaaaaaaaaaaaaaaaaaaaaaaaaaaaaaaaaaaaaaaaaaaaaaaaaaaaaaaaaaaa

SEQ ID NO: 229 - RNA, 6858 nt, synthetic construct
  source 1..6858: mol_type = other RNA
aggaaataagagagaaaagaagagtaagaagaaatataagagccaccatgaaacggacagccgacggaagcgagttcgagtcaccaaagaagaagcggaaagtcgacaagaagtacagcatcggcctggacatcggcaccaactctgtgggctgggccgtgatcaccgacgagtacaaggtgcccagcaagaaattcaaggtgctgggcaacaccgaccggcacagcatcaagaagaacctgatcggagccctgctgttcgacagcggcgaaacagccgaggccacccggctgaagagaaccgccagaagaagatacaccagacggaagaaccggatctgctatctgcaagagatcttcagcaacgagatggccaaggtggacgacagcttcttccacagactggaagagtccttcctggtggaagaggataagaagcacgagcggcaccccatcttcggcaacatcgtggacgaggtggcctaccacgagaagtaccccaccatctaccacctgagaaagaaactggtggacagcaccgacaaggccgacctgcggctgatctatctggccctggcccacatgatcaagttccggggccacttcctgatcgagggcgacctgaaccccgacaacagcgacgtggacaagctgttcatccagctggtgcagacctacaaccagctgttcgaggaaaaccccatcaacgccagcggcgtggacgccaaggccatcctgtctgccagactgagcaagagcagaaagctggaaaatctgatcgcccagctgcccggcgagaagaagaatggcctgttcggaaacctgattgccctgagcctgggcctgacccccaacttcaagagcaacttcgacctggccgaggatgccaaactgcagctgagcaaggacacctacgacgacgacctggacaacctgctggcccagatcggcgaccagtacgccgacctgtttctggccgccaagaacctgtccgacgccatcctgctgagcgacatcctgagagtgaacaccgagatcaccaaggcccccctgagcgcctctatgatcaagagatacgacgagcaccaccaggacctgaccctgctgaaagctctcgtgcggcagcagctgcctgagaagtacaaagagattttcttcgaccagagcaagaacggctacgccggctacattgacggcggagccagccaggaagagttctacaagttcatcaagcccatcctggaaaagatggacggcaccgaggaactgctcgtgaagctgaagagagaggacctgctgcggaagcagcggaccttcgacaacggcagcatcccccaccagatccacctgggagagctgcacgccattctgcggcggcaggaagatttttacccattcctgaaggacaaccgggaaaagatcgagaagatcctgaccttccgcatcccctactacgtgggccctctggccaggggaaacagcagattcgcctggatgaccagaaagagcgaggaaaccatcaccccctggaacttcgaggaagtggtggacaagggcgcttccgcccagagcttcatcgagcggatgaccaacttcgataagaacctgcccaacgagaaggtgctgcccaagcacagcctgctgtacgagtacttcaccgtgtataacgagctgaccaaagtgaaatacgtgaccgagggaatgagaaagcccgccttcctgagcggcgagcagaaaaaggccatcgtggacctgctgttcaagaccaaccggaaagtgaccgtgaagcagctgaaagaggactacttcaagaaaatcgagtgcttcgactccgtggaaatctccggcgtggaagatcggttcaacgcctccctgggcacataccacgatctgctgaaaattatcaaggacaaggacttcctggacaatgaggaaaacgaggacattctggaagatatcgtgctgaccctgacactgtttgaggacagagagatgatcgaggaacggctgaaaacctatgcccacctgttcgacgacaaagtgatgaagcagctgaagcggcggagatacaccggctggggcaggctgagccggaagctgatcaacggcatccgggacaagcagtccggcaagacaatcctggatttcctgaagtccgacggcttcgccaacagaaacttcatgcagctgatccacgacgacagcctgacctttaaagaggacatccagaaagcccaggtgtccggccagggcgatagcctgcacgagcacattgccaatctggccggcagccccgccattaagaagggcatcctgcagacagtgaaggtggtggacgagctcgtgaaagtgatgggccggcacaagcccgagaacatcgtgatcgaaatggccagagagaaccagaccacccagaagggacagaagaacagccgcgagagaatgaagcggatcgaagagggcatcaaagagctgggcagccagatcctgaaagaacaccccgtggaaaacacccagctgcagaacgagaagctgtacctgtactacctgcagaatgggcgggatatgtacgtggaccaggaactggacatcaaccggctgtccgactacgatgtggacgctatcgtgcctcagagctttctgaaggacgactccatcgacaacaaggtgctgaccagaagcgacaagaaccggggcaagagcgacaacgtgccctccgaagaggtcgtgaagaagatgaagaactactggcggcagctgctgaacgccaagctgattacccagagaaagttcgacaatctgaccaaggccgagagaggcggcctgagcgaactggataaggccggcttcatcaagagacagctggtggaaacccggcagatcacaaagcacgtggcacagatcctggactcccggatgaacactaagtacgacgagaatgacaagctgatccgggaagtgaaagtgatcaccctgaagtccaagctggtgtccgatttccggaaggatttccagttttacaaagtgcgcgagatcaacaactaccaccacgcccacgacgcctacctgaacgccgtcgtgggaaccgccctgatcaaaaagtaccctaagctggaaagcgagttcgtgtacggcgactacaaggtgtacgacgtgcggaagatgatcgccaagagcgagcaggaaatcggcaaggctaccgccaagtacttcttctacagcaacatcatgaactttttcaagaccgagattaccctggccaacggcgagatccggaagcggcctctgatcgagacaaacggcgaaaccggggagatcgtgtgggataagggccgggattttgccaccgtgcggaaagtgctgagcatgccccaagtgaatatcgtgaaaaagaccgaggtgcagacaggcggcttcagcaaagagtctatcctgcccaagaggaacagcgataagctgatcgccagaaagaaggactgggaccctaagaagtacggcggcttcgacagccccaccgtggcctattctgtgctggtggtggccaaagtggaaaagggcaagtccaagaaactgaagagtgtgaaagagctgctggggatcaccatcatggaaagaagcagcttcgagaagaatcccatcgactttctggaagccaagggctacaaagaagtgaaaaaggacctgatcatcaagctgcctaagtactccctgttcgagctggaaaacggccggaagagaatgctggcctctgccggcgaactgcagaagggaaacgaactggccctgccctccaaatatgtgaacttcctgtacctggccagccactatgagaagctgaagggctcccccgaggataatgagcagaaacagctgtttgtggaacagcacaagcactacctggacgagatcatcgagcagatcagcgagttctccaagagagtgatcctggccgacgctaatctggacaaagtgctgtccgcctacaacaagcaccgggataagcccatcagagagcaggccgagaatatcatccacctgtttaccctgaccaatctgggagcccctgccgccttcaagtactttgacaccaccatcgaccggaagaggtacaccagcaccaaagaggtgctggacgccaccctgatccaccagagcatcaccggcctgtacgagacacggatcgacctgtctcagctgggaggtgactccggcggaagctctggtggcagcaagcggaccgccgacggctctgaattcgagagccctaagaagaaaagaaaggtgagcggaggctctagcggcggaagcaccctgaacattgaagacgagtatagactgcatgaaacaagcaaggaacccgacgtgtccctgggctccacctggctgtccgactttccccaggcctgggccgagacaggaggaatgggcctggccgtgcggcaggcacccctgatcatccctctgaaggccacctctacacccgtgagcatcaagcagtaccctatgtctcaggaggccagactgggcatcaagcctcacatccagaggctgctggaccagggcatcctggtgccatgccagagcccctggaacacaccactgctgcccgtgaagaagccaggcaccaatgactatagacccgtgcaggatctgagagaggtgaacaagagggtggaggatatccaccccaccgtgcccaacccttacaatctgctgtccggcctgcccccttctcaccagtggtatacagtgctggacctgaaggatgccttcttttgtctgagactgcaccctaccagccagccactgttcgcctttgagtggagggaccctgagatgggcatctctggccagctgacctggacacgcctgcctcagggcttcaagaatagcccaacactgtttaacgaggccctgcaccgcgacctggcagatttccggatccagcacccagatctgatcctgctgcagtacgtggacgatctgctgctggccgccaccagcgagctggattgccagcagggaacacgcgccctgctgcagaccctgggaaacctgggatatagggcatccgccaagaaggcccagatctgtcagaagcaggtgaagtacctgggctatctgctgaaggagggccagagatggctgacagaggccaggaaggagacagtgatgggccagccaacacccaagaccccaagacagctgagggagttcctgggcaaagcaggattttgcaggctgttcatcccaggattcgcagagatggcagcacctctgtacccactgaccaagccgggcaccctgtttaattggggccctgaccagcagaaggcctatcaggagatcaagcaggccctgctgacagcaccagccctgggcctgccagacctgaccaagcctttcgagctgtttgtggatgagaagcagggctacgccaagggcgtgctgacccagaagctgggaccatggagacggcccgtggcctatctgtccaagaagctggacccagtggcagcaggatggccaccatgcctgaggatggtggcagcaatcgccgtgctgacaaaggatgccggcaagctgaccatgggacagccactggtcatcctggcaccacacgcagtggaggccctggtgaagcagcctccagatcgctggctgtctaacgcccggatgacacactaccaggccctgctgctggacaccgatcgcgtgcagtttggccctgtggtggccctgaatccagccaccctgctgcctctgccagaggagggcctgcagcacaactgtctggacatcctggcagaggcacacggaacaaggccagacctgaccgatcagcccctgcctgacgccgatcacacatggtataccgatggaagctccctgctgcaggagggccagaggaaggcaggagcagcagtgaccacagagacagaagtgatctgggccaaggccctgccagcaggcacatccgcccagcgggccgagctgatcgccctgacccaggccctgaagatggccgagggcaagaagctgaacgtgtacacagactccagatatgccttcgccaccgcacacatccacggagagatctacaggcgccggggctggctgacctctgagggcaaggagatcaagaacaaggatgagatcctggccctgctgaaggccctgtttctgcccaagcggctgagcatcatccactgtcctggacaccagaagggacactccgccgaggcaaggggcaatcggatggccgaccaggccgccagaaaggctgctattactgaaactcccgacacttccactctgctgattgaaaactcctccccttctggcggctcaaaaagaaccgccgacggcagcgaattcgagtctcccaagaagaagaggaaagtcggctctggccctgccgctaagagagtgaagctggactgagctggagcctcggtggccatgcttcttgccccttgggcctccccccagcccctcctccccttcctgcacccgtacccccgtggtctttgaataaagtctgagtgggcggccactcctccatggtgatataaagaccacccacttccttcgggtgagcccctaagccatggttgtactgcactatcatcctaagacggtccttcttcggatcgcaatctcaccctggtgccgcgcttccttcgggaactgcacccgcggaccagggccgtctttgaacttttctaactgttcttacaaaaaaaaaaaaaaaaaaaaaaaaaaaaaagcatatgactaaaaaaaaaaaaaaaaaaaaaaaaaaaaaaaaaaaaaaaaaaaaaaaaaaaaaaaaaaaaaaaaaaaaaaaaaaaaaaaa

SEQ ID NO: 230 - RNA, 6868 nt, synthetic construct
  source 1..6868: mol_type = other RNA
aggaaataagagagaaaagaagagtaagaagaaatataagagccaccatgaaacggacagccgacggaagcgagttcgagtcaccaaagaagaagcggaaagtcgacaagaagtacagcatcggcctggacatcggcaccaactctgtgggctgggccgtgatcaccgacgagtacaaggtgcccagcaagaaattcaaggtgctgggcaacaccgaccggcacagcatcaagaagaacctgatcggagccctgctgttcgacagcggcgaaacagccgaggccacccggctgaagagaaccgccagaagaagatacaccagacggaagaaccggatctgctatctgcaagagatcttcagcaacgagatggccaaggtggacgacagcttcttccacagactggaagagtccttcctggtggaagaggataagaagcacgagcggcaccccatcttcggcaacatcgtggacgaggtggcctaccacgagaagtaccccaccatctaccacctgagaaagaaactggtggacagcaccgacaaggccgacctgcggctgatctatctggccctggcccacatgatcaagttccggggccacttcctgatcgagggcgacctgaaccccgacaacagcgacgtggacaagctgttcatccagctggtgcagacctacaaccagctgttcgaggaaaaccccatcaacgccagcggcgtggacgccaaggccatcctgtctgccagactgagcaagagcagaaagctggaaaatctgatcgcccagctgcccggcgagaagaagaatggcctgttcggaaacctgattgccctgagcctgggcctgacccccaacttcaagagcaacttcgacctggccgaggatgccaaactgcagctgagcaaggacacctacgacgacgacctggacaacctgctggcccagatcggcgaccagtacgccgacctgtttctggccgccaagaacctgtccgacgccatcctgctgagcgacatcctgagagtgaacaccgagatcaccaaggcccccctgagcgcctctatgatcaagagatacgacgagcaccaccaggacctgaccctgctgaaagctctcgtgcggcagcagctgcctgagaagtacaaagagattttcttcgaccagagcaagaacggctacgccggctacattgacggcggagccagccaggaagagttctacaagttcatcaagcccatcctggaaaagatggacggcaccgaggaactgctcgtgaagctgaagagagaggacctgctgcggaagcagcggaccttcgacaacggcagcatcccccaccagatccacctgggagagctgcacgccattctgcggcggcaggaagatttttacccattcctgaaggacaaccgggaaaagatcgagaagatcctgaccttccgcatcccctactacgtgggccctctggccaggggaaacagcagattcgcctggatgaccagaaagagcgaggaaaccatcaccccctggaacttcgaggaagtggtggacaagggcgcttccgcccagagcttcatcgagcggatgaccaacttcgataagaacctgcccaacgagaaggtgctgcccaagcacagcctgctgtacgagtacttcaccgtgtataacgagctgaccaaagtgaaatacgtgaccgagggaatgagaaagcccgccttcctgagcggcgagcagaaaaaggccatcgtggacctgctgttcaagaccaaccggaaagtgaccgtgaagcagctgaaagaggactacttcaagaaaatcgagtgcttcgactccgtggaaatctccggcgtggaagatcggttcaacgcctccctgggcacataccacgatctgctgaaaattatcaaggacaaggacttcctggacaatgaggaaaacgaggacattctggaagatatcgtgctgaccctgacactgtttgaggacagagagatgatcgaggaacggctgaaaacctatgcccacctgttcgacgacaaagtgatgaagcagctgaagcggcggagatacaccggctggggcaggctgagccggaagctgatcaacggcatccgggacaagcagtccggcaagacaatcctggatttcctgaagtccgacggcttcgccaacagaaacttcatgcagctgatccacgacgacagcctgacctttaaagaggacatccagaaagcccaggtgtccggccagggcgatagcctgcacgagcacattgccaatctggccggcagccccgccattaagaagggcatcctgcagacagtgaaggtggtggacgagctcgtgaaagtgatgggccggcacaagcccgagaacatcgtgatcgaaatggccagagagaaccagaccacccagaagggacagaagaacagccgcgagagaatgaagcggatcgaagagggcatcaaagagctgggcagccagatcctgaaagaacaccccgtggaaaacacccagctgcagaacgagaagctgtacctgtactacctgcagaatgggcgggatatgtacgtggaccaggaactggacatcaaccggctgtccgactacgatgtggacgctatcgtgcctcagagctttctgaaggacgactccatcgacaacaaggtgctgaccagaagcgacaagaaccggggcaagagcgacaacgtgccctccgaagaggtcgtgaagaagatgaagaactactggcggcagctgctgaacgccaagctgattacccagagaaagttcgacaatctgaccaaggccgagagaggcggcctgagcgaactggataaggccggcttcatcaagagacagctggtggaaacccggcagatcacaaagcacgtggcacagatcctggactcccggatgaacactaagtacgacgagaatgacaagctgatccgggaagtgaaagtgatcaccctgaagtccaagctggtgtccgatttccggaaggatttccagttttacaaagtgcgcgagatcaacaactaccaccacgcccacgacgcctacctgaacgccgtcgtgggaaccgccctgatcaaaaagtaccctaagctggaaagcgagttcgtgtacggcgactacaaggtgtacgacgtgcggaagatgatcgccaagagcgagcaggaaatcggcaaggctaccgccaagtacttcttctacagcaacatcatgaactttttcaagaccgagattaccctggccaacggcgagatccggaagcggcctctgatcgagacaaacggcgaaaccggggagatcgtgtgggataagggccgggattttgccaccgtgcggaaagtgctgagcatgccccaagtgaatatcgtgaaaaagaccgaggtgcagacaggcggcttcagcaaagagtctatcctgcccaagaggaacagcgataagctgatcgccagaaagaaggactgggaccctaagaagtacggcggcttcgacagccccaccgtggcctattctgtgctggtggtggccaaagtggaaaagggcaagtccaagaaactgaagagtgtgaaagagctgctggggatcaccatcatggaaagaagcagcttcgagaagaatcccatcgactttctggaagccaagggctacaaagaagtgaaaaaggacctgatcatcaagctgcctaagtactccctgttcgagctggaaaacggccggaagagaatgctggcctctgccggcgaactgcagaagggaaacgaactggccctgccctccaaatatgtgaacttcctgtacctggccagccactatgagaagctgaagggctcccccgaggataatgagcagaaacagctgtttgtggaacagcacaagcactacctggacgagatcatcgagcagatcagcgagttctccaagagagtgatcctggccgacgctaatctggacaaagtgctgtccgcctacaacaagcaccgggataagcccatcagagagcaggccgagaatatcatccacctgtttaccctgaccaatctgggagcccctgccgccttcaagtactttgacaccaccatcgaccggaagaggtacaccagcaccaaagaggtgctggacgccaccctgatccaccagagcatcaccggcctgtacgagacacggatcgacctgtctcagctgggaggtgactccggcggaagctctggtggcagcaagcggaccgccgacggctctgaattcgagagccctaagaagaaaagaaaggtgagcggaggctctagcggcggaagcaccctgaacattgaagacgagtatagactgcatgaaacaagcaaggaacccgacgtgtccctgggctccacctggctgtccgactttccccaggcctgggccgagacaggaggaatgggcctggccgtgcggcaggcacccctgatcatccctctgaaggccacctctacacccgtgagcatcaagcagtaccctatgtctcaggaggccagactgggcatcaagcctcacatccagaggctgctggaccagggcatcctggtgccatgccagagcccctggaacacaccactgctgcccgtgaagaagccaggcaccaatgactatagacccgtgcaggatctgagagaggtgaacaagagggtggaggatatccaccccaccgtgcccaacccttacaatctgctgtccggcctgcccccttctcaccagtggtatacagtgctggacctgaaggatgccttcttttgtctgagactgcaccctaccagccagccactgttcgcctttgagtggagggaccctgagatgggcatctctggccagctgacctggacacgcctgcctcagggcttcaagaatagcccaacactgtttaacgaggccctgcaccgcgacctggcagatttccggatccagcacccagatctgatcctgctgcagtacgtggacgatctgctgctggccgccaccagcgagctggattgccagcagggaacacgcgccctgctgcagaccctgggaaacctgggatatagggcatccgccaagaaggcccagatctgtcagaagcaggtgaagtacctgggctatctgctgaaggagggccagagatggctgacagaggccaggaaggagacagtgatgggccagccaacacccaagaccccaagacagctgagggagttcctgggcaaagcaggattttgcaggctgttcatcccaggattcgcagagatggcagcacctctgtacccactgaccaagccgggcaccctgtttaattggggccctgaccagcagaaggcctatcaggagatcaagcaggccctgctgacagcaccagccctgggcctgccagacctgaccaagcctttcgagctgtttgtggatgagaagcagggctacgccaagggcgtgctgacccagaagctgggaccatggagacggcccgtggcctatctgtccaagaagctggacccagtggcagcaggatggccaccatgcctgaggatggtggcagcaatcgccgtgctgacaaaggatgccggcaagctgaccatgggacagccactggtcatcctggcaccacacgcagtggaggccctggtgaagcagcctccagatcgctggctgtctaacgcccggatgacacactaccaggccctgctgctggacaccgatcgcgtgcagtttggccctgtggtggccctgaatccagccaccctgctgcctctgccagaggagggcctgcagcacaactgtctggacatcctggcagaggcacacggaacaaggccagacctgaccgatcagcccctgcctgacgccgatcacacatggtataccgatggaagctccctgctgcaggagggccagaggaaggcaggagcagcagtgaccacagagacagaagtgatctgggccaaggccctgccagcaggcacatccgcccagcgggccgagctgatcgccctgacccaggccctgaagatggccgagggcaagaagctgaacgtgtacacagactccagatatgccttcgccaccgcacacatccacggagagatctacaggcgccggggctggctgacctctgagggcaaggagatcaagaacaaggatgagatcctggccctgctgaaggccctgtttctgcccaagcggctgagcatcatccactgtcctggacaccagaagggacactccgccgaggcaaggggcaatcggatggccgaccaggccgccagaaaggctgctattactgaaactcccgacacttccactctgctgattgaaaactcctccccttctggcggctcaaaaagaaccgccgacggcagcgaattcgagtctcccaagaagaagaggaaagtcggctctggccctgccgctaagagagtgaagctggactgagctggagcctcggtggccatgcttcttgccccttgggcctccccccagcccctcctccccttcctgcacccgtacccccgtggtctttgaataaagtctgagtgggcggccactcctccatggtgatataaagaccacccacttccttcgggtgagcccctaagccatggttgtactgcactatcatcctaagacggtccttcttcggatcgcaatctcaccctggtgccgcgcttccttcgggaactgcacccgcggaccagggccgtctttgaacttttctaactgttcttacaaaaaaaaaaaaaaaaaaaaaaaaaaaaaaaaaaaaaaaagcatatgactaaaaaaaaaaaaaaaaaaaaaaaaaaaaaagcataagactaaaaaaaaaaaaaaaaaaaaaaaaaaaaaaaaaaaaaaaa

SEQ ID NO: 231 - RNA, 6868 nt, synthetic construct
  source 1..6868: mol_type = other RNA
aggaaataagagagaaaagaagagtaagaagaaatataagagccaccatgaaacggacagccgacggaagcgagttcgagtcaccaaagaagaagcggaaagtcgacaagaagtacagcatcggcctggacatcggcaccaactctgtgggctgggccgtgatcaccgacgagtacaaggtgcccagcaagaaattcaaggtgctgggcaacaccgaccggcacagcatcaagaagaacctgatcggagccctgctgttcgacagcggcgaaacagccgaggccacccggctgaagagaaccgccagaagaagatacaccagacggaagaaccggatctgctatctgcaagagatcttcagcaacgagatggccaaggtggacgacagcttcttccacagactggaagagtccttcctggtggaagaggataagaagcacgagcggcaccccatcttcggcaacatcgtggacgaggtggcctaccacgagaagtaccccaccatctaccacctgagaaagaaactggtggacagcaccgacaaggccgacctgcggctgatctatctggccctggcccacatgatcaagttccggggccacttcctgatcgagggcgacctgaaccccgacaacagcgacgtggacaagctgttcatccagctggtgcagacctacaaccagctgttcgaggaaaaccccatcaacgccagcggcgtggacgccaaggccatcctgtctgccagactgagcaagagcagaaagctggaaaatctgatcgcccagctgcccggcgagaagaagaatggcctgttcggaaacctgattgccctgagcctgggcctgacccccaacttcaagagcaacttcgacctggccgaggatgccaaactgcagctgagcaaggacacctacgacgacgacctggacaacctgctggcccagatcggcgaccagtacgccgacctgtttctggccgccaagaacctgtccgacgccatcctgctgagcgacatcctgagagtgaacaccgagatcaccaaggcccccctgagcgcctctatgatcaagagatacgacgagcaccaccaggacctgaccctgctgaaagctctcgtgcggcagcagctgcctgagaagtacaaagagattttcttcgaccagagcaagaacggctacgccggctacattgacggcggagccagccaggaagagttctacaagttcatcaagcccatcctggaaaagatggacggcaccgaggaactgctcgtgaagctgaagagagaggacctgctgcggaagcagcggaccttcgacaacggcagcatcccccaccagatccacctgggagagctgcacgccattctgcggcggcaggaagatttttacccattcctgaaggacaaccgggaaaagatcgagaagatcctgaccttccgcatcccctactacgtgggccctctggccaggggaaacagcagattcgcctggatgaccagaaagagcgaggaaaccatcaccccctggaacttcgaggaagtggtggacaagggcgcttccgcccagagcttcatcgagcggatgaccaacttcgataagaacctgcccaacgagaaggtgctgcccaagcacagcctgctgtacgagtacttcaccgtgtataacgagctgaccaaagtgaaatacgtgaccgagggaatgagaaagcccgccttcctgagcggcgagcagaaaaaggccatcgtggacctgctgttcaagaccaaccggaaagtgaccgtgaagcagctgaaagaggactacttcaagaaaatcgagtgcttcgactccgtggaaatctccggcgtggaagatcggttcaacgcctccctgggcacataccacgatctgctgaaaattatcaaggacaaggacttcctggacaatgaggaaaacgaggacattctggaagatatcgtgctgaccctgacactgtttgaggacagagagatgatcgaggaacggctgaaaacctatgcccacctgttcgacgacaaagtgatgaagcagctgaagcggcggagatacaccggctggggcaggctgagccggaagctgatcaacggcatccgggacaagcagtccggcaagacaatcctggatttcctgaagtccgacggcttcgccaacagaaacttcatgcagctgatccacgacgacagcctgacctttaaagaggacatccagaaagcccaggtgtccggccagggcgatagcctgcacgagcacattgccaatctggccggcagccccgccattaagaagggcatcctgcagacagtgaaggtggtggacgagctcgtgaaagtgatgggccggcacaagcccgagaacatcgtgatcgaaatggccagagagaaccagaccacccagaagggacagaagaacagccgcgagagaatgaagcggatcgaagagggcatcaaagagctgggcagccagatcctgaaagaacaccccgtggaaaacacccagctgcagaacgagaagctgtacctgtactacctgcagaatgggcgggatatgtacgtggaccaggaactggacatcaaccggctgtccgactacgatgtggacgctatcgtgcctcagagctttctgaaggacgactccatcgacaacaaggtgctgaccagaagcgacaagaaccggggcaagagcgacaacgtgccctccgaagaggtcgtgaagaagatgaagaactactggcggcagctgctgaacgccaagctgattacccagagaaagttcgacaatctgaccaaggccgagagaggcggcctgagcgaactggataaggccggcttcatcaagagacagctggtggaaacccggcagatcacaaagcacgtggcacagatcctggactcccggatgaacactaagtacgacgagaatgacaagctgatccgggaagtgaaagtgatcaccctgaagtccaagctggtgtccgatttccggaaggatttccagttttacaaagtgcgcgagatcaacaactaccaccacgcccacgacgcctacctgaacgccgtcgtgggaaccgccctgatcaaaaagtaccctaagctggaaagcgagttcgtgtacggcgactacaaggtgtacgacgtgcggaagatgatcgccaagagcgagcaggaaatcggcaaggctaccgccaagtacttcttctacagcaacatcatgaactttttcaagaccgagattaccctggccaacggcgagatccggaagcggcctctgatcgagacaaacggcgaaaccggggagatcgtgtgggataagggccgggattttgccaccgtgcggaaagtgctgagcatgccccaagtgaatatcgtgaaaaagaccgaggtgcagacaggcggcttcagcaaagagtctatcctgcccaagaggaacagcgataagctgatcgccagaaagaaggactgggaccctaagaagtacggcggcttcgacagccccaccgtggcctattctgtgctggtggtggccaaagtggaaaagggcaagtccaagaaactgaagagtgtgaaagagctgctggggatcaccatcatggaaagaagcagcttcgagaagaatcccatcgactttctggaagccaagggctacaaagaagtgaaaaaggacctgatcatcaagctgcctaagtactccctgttcgagctggaaaacggccggaagagaatgctggcctctgccggcgaactgcagaagggaaacgaactggccctgccctccaaatatgtgaacttcctgtacctggccagccactatgagaagctgaagggctcccccgaggataatgagcagaaacagctgtttgtggaacagcacaagcactacctggacgagatcatcgagcagatcagcgagttctccaagagagtgatcctggccgacgctaatctggacaaagtgctgtccgcctacaacaagcaccgggataagcccatcagagagcaggccgagaatatcatccacctgtttaccctgaccaatctgggagcccctgccgccttcaagtactttgacaccaccatcgaccggaagaggtacaccagcaccaaagaggtgctggacgccaccctgatccaccagagcatcaccggcctgtacgagacacggatcgacctgtctcagctgggaggtgactccggcggaagctctggtggcagcaagcggaccgccgacggctctgaattcgagagccctaagaagaaaagaaaggtgagcggaggctctagcggcggaagcaccctgaacattgaagacgagtatagactgcatgaaacaagcaaggaacccgacgtgtccctgggctccacctggctgtccgactttccccaggcctgggccgagacaggaggaatgggcctggccgtgcggcaggcacccctgatcatccctctgaaggccacctctacacccgtgagcatcaagcagtaccctatgtctcaggaggccagactgggcatcaagcctcacatccagaggctgctggaccagggcatcctggtgccatgccagagcccctggaacacaccactgctgcccgtgaagaagccaggcaccaatgactatagacccgtgcaggatctgagagaggtgaacaagagggtggaggatatccaccccaccgtgcccaacccttacaatctgctgtccggcctgcccccttctcaccagtggtatacagtgctggacctgaaggatgccttcttttgtctgagactgcaccctaccagccagccactgttcgcctttgagtggagggaccctgagatgggcatctctggccagctgacctggacacgcctgcctcagggcttcaagaatagcccaacactgtttaacgaggccctgcaccgcgacctggcagatttccggatccagcacccagatctgatcctgctgcagtacgtggacgatctgctgctggccgccaccagcgagctggattgccagcagggaacacgcgccctgctgcagaccctgggaaacctgggatatagggcatccgccaagaaggcccagatctgtcagaagcaggtgaagtacctgggctatctgctgaaggagggccagagatggctgacagaggccaggaaggagacagtgatgggccagccaacacccaagaccccaagacagctgagggagttcctgggcaaagcaggattttgcaggctgttcatcccaggattcgcagagatggcagcacctctgtacccactgaccaagccgggcaccctgtttaattggggccctgaccagcagaaggcctatcaggagatcaagcaggccctgctgacagcaccagccctgggcctgccagacctgaccaagcctttcgagctgtttgtggatgagaagcagggctacgccaagggcgtgctgacccagaagctgggaccatggagacggcccgtggcctatctgtccaagaagctggacccagtggcagcaggatggccaccatgcctgaggatggtggcagcaatcgccgtgctgacaaaggatgccggcaagctgaccatgggacagccactggtcatcctggcaccacacgcagtggaggccctggtgaagcagcctccagatcgctggctgtctaacgcccggatgacacactaccaggccctgctgctggacaccgatcgcgtgcagtttggccctgtggtggccctgaatccagccaccctgctgcctctgccagaggagggcctgcagcacaactgtctggacatcctggcagaggcacacggaacaaggccagacctgaccgatcagcccctgcctgacgccgatcacacatggtataccgatggaagctccctgctgcaggagggccagaggaaggcaggagcagcagtgaccacagagacagaagtgatctgggccaaggccctgccagcaggcacatccgcccagcgggccgagctgatcgccctgacccaggccctgaagatggccgagggcaagaagctgaacgtgtacacagactccagatatgccttcgccaccgcacacatccacggagagatctacaggcgccggggctggctgacctctgagggcaaggagatcaagaacaaggatgagatcctggccctgctgaaggccctgtttctgcccaagcggctgagcatcatccactgtcctggacaccagaagggacactccgccgaggcaaggggcaatcggatggccgaccaggccgccagaaaggctgctattactgaaactcccgacacttccactctgctgattgaaaactcctccccttctggcggctcaaaaagaaccgccgacggcagcgaattcgagtctcccaagaagaagaggaaagtcggctctggccctgccgctaagagagtgaagctggactgagctggagcctcggtggccatgcttcttgccccttgggcctccccccagcccctcctccccttcctgcacccgtacccccgtggtctttgaataaagtctgagtgggcggccactcctccatggtgatataaagaccacccacttccttcgggtgagcccctaagccatggttgtactgcactatcatcctaagacggtccttcttcggatcgcaatctcaccctggtgccgcgcttccttcgggaactgcacccgcggaccagggccgtctttgaacttttctaactgttcttacaaaaaaaaaaaaaaacaaaaaaaaaaaaaaaaaaaaaaaaaaaccaaaaaaaaaaaaaaaaaaaaaaaaaaaaaaaaaaaccccaaaaaaaaaaaaaaaaaaaaaaaaaaaaaaaaaaaaaaaaaaaaaa

SEQ ID NO: 232 - RNA, 6868 nt, synthetic construct
  source 1..6868: mol_type = other RNA
aggaaataagagagaaaagaagagtaagaagaaatataagagccaccatgaaacggacagccgacggaagcgagttcgagtcaccaaagaagaagcggaaagtcgacaagaagtacagcatcggcctggacatcggcaccaactctgtgggctgggccgtgatcaccgacgagtacaaggtgcccagcaagaaattcaaggtgctgggcaacaccgaccggcacagcatcaagaagaacctgatcggagccctgctgttcgacagcggcgaaacagccgaggccacccggctgaagagaaccgccagaagaagatacaccagacggaagaaccggatctgctatctgcaagagatcttcagcaacgagatggccaaggtggacgacagcttcttccacagactggaagagtccttcctggtggaagaggataagaagcacgagcggcaccccatcttcggcaacatcgtggacgaggtggcctaccacgagaagtaccccaccatctaccacctgagaaagaaactggtggacagcaccgacaaggccgacctgcggctgatctatctggccctggcccacatgatcaagttccggggccacttcctgatcgagggcgacctgaaccccgacaacagcgacgtggacaagctgttcatccagctggtgcagacctacaaccagctgttcgaggaaaaccccatcaacgccagcggcgtggacgccaaggccatcctgtctgccagactgagcaagagcagaaagctggaaaatctgatcgcccagctgcccggcgagaagaagaatggcctgttcggaaacctgattgccctgagcctgggcctgacccccaacttcaagagcaacttcgacctggccgaggatgccaaactgcagctgagcaaggacacctacgacgacgacctggacaacctgctggcccagatcggcgaccagtacgccgacctgtttctggccgccaagaacctgtccgacgccatcctgctgagcgacatcctgagagtgaacaccgagatcaccaaggcccccctgagcgcctctatgatcaagagatacgacgagcaccaccaggacctgaccctgctgaaagctctcgtgcggcagcagctgcctgagaagtacaaagagattttcttcgaccagagcaagaacggctacgccggctacattgacggcggagccagccaggaagagttctacaagttcatcaagcccatcctggaaaagatggacggcaccgaggaactgctcgtgaagctgaagagagaggacctgctgcggaagcagcggaccttcgacaacggcagcatcccccaccagatccacctgggagagctgcacgccattctgcggcggcaggaagatttttacccattcctgaaggacaaccgggaaaagatcgagaagatcctgaccttccgcatcccctactacgtgggccctctggccaggggaaacagcagattcgcctggatgaccagaaagagcgaggaaaccatcaccccctggaacttcgaggaagtggtggacaagggcgcttccgcccagagcttcatcgagcggatgaccaacttcgataagaacctgcccaacgagaaggtgctgcccaagcacagcctgctgtacgagtacttcaccgtgtataacgagctgaccaaagtgaaatacgtgaccgagggaatgagaaagcccgccttcctgagcggcgagcagaaaaaggccatcgtggacctgctgttcaagaccaaccggaaagtgaccgtgaagcagctgaaagaggactacttcaagaaaatcgagtgcttcgactccgtggaaatctccggcgtggaagatcggttcaacgcctccctgggcacataccacgatctgctgaaaattatcaaggacaaggacttcctggacaatgaggaaaacgaggacattctggaagatatcgtgctgaccctgacactgtttgaggacagagagatgatcgaggaacggctgaaaacctatgcccacctgttcgacgacaaagtgatgaagcagctgaagcggcggagatacaccggctggggcaggctgagccggaagctgatcaacggcatccgggacaagcagtccggcaagacaatcctggatttcctgaagtccgacggcttcgccaacagaaacttcatgcagctgatccacgacgacagcctgacctttaaagaggacatccagaaagcccaggtgtccggccagggcgatagcctgcacgagcacattgccaatctggccggcagccccgccattaagaagggcatcctgcagacagtgaaggtggtggacgagctcgtgaaagtgatgggccggcacaagcccgagaacatcgtgatcgaaatggccagagagaaccagaccacccagaagggacagaagaacagccgcgagagaatgaagcggatcgaagagggcatcaaagagctgggcagccagatcctgaaagaacaccccgtggaaaacacccagctgcagaacgagaagctgtacctgtactacctgcagaatgggcgggatatgtacgtggaccaggaactggacatcaaccggctgtccgactacgatgtggacgctatcgtgcctcagagctttctgaaggacgactccatcgacaacaaggtgctgaccagaagcgacaagaaccggggcaagagcgacaacgtgccctccgaagaggtcgtgaagaagatgaagaactactggcggcagctgctgaacgccaagctgattacccagagaaagttcgacaatctgaccaaggccgagagaggcggcctgagcgaactggataaggccggcttcatcaagagacagctggtggaaacccggcagatcacaaagcacgtggcacagatcctggactcccggatgaacactaagtacgacgagaatgacaagctgatccgggaagtgaaagtgatcaccctgaagtccaagctggtgtccgatttccggaaggatttccagttttacaaagtgcgcgagatcaacaactaccaccacgcccacgacgcctacctgaacgccgtcgtgggaaccgccctgatcaaaaagtaccctaagctggaaagcgagttcgtgtacggcgactacaaggtgtacgacgtgcggaagatgatcgccaagagcgagcaggaaatcggcaaggctaccgccaagtacttcttctacagcaacatcatgaactttttcaagaccgagattaccctggccaacggcgagatccggaagcggcctctgatcgagacaaacggcgaaaccggggagatcgtgtgggataagggccgggattttgccaccgtgcggaaagtgctgagcatgccccaagtgaatatcgtgaaaaagaccgaggtgcagacaggcggcttcagcaaagagtctatcctgcccaagaggaacagcgataagctgatcgccagaaagaaggactgggaccctaagaagtacggcggcttcgacagccccaccgtggcctattctgtgctggtggtggccaaagtggaaaagggcaagtccaagaaactgaagagtgtgaaagagctgctggggatcaccatcatggaaagaagcagcttcgagaagaatcccatcgactttctggaagccaagggctacaaagaagtgaaaaaggacctgatcatcaagctgcctaagtactccctgttcgagctggaaaacggccggaagagaatgctggcctctgccggcgaactgcagaagggaaacgaactggccctgccctccaaatatgtgaacttcctgtacctggccagccactatgagaagctgaagggctcccccgaggataatgagcagaaacagctgtttgtggaacagcacaagcactacctggacgagatcatcgagcagatcagcgagttctccaagagagtgatcctggccgacgctaatctggacaaagtgctgtccgcctacaacaagcaccgggataagcccatcagagagcaggccgagaatatcatccacctgtttaccctgaccaatctgggagcccctgccgccttcaagtactttgacaccaccatcgaccggaagaggtacaccagcaccaaagaggtgctggacgccaccctgatccaccagagcatcaccggcctgtacgagacacggatcgacctgtctcagctgggaggtgactccggcggaagctctggtggcagcaagcggaccgccgacggctctgaattcgagagccctaagaagaaaagaaaggtgagcggaggctctagcggcggaagcaccctgaacattgaagacgagtatagactgcatgaaacaagcaaggaacccgacgtgtccctgggctccacctggctgtccgactttccccaggcctgggccgagacaggaggaatgggcctggccgtgcggcaggcacccctgatcatccctctgaaggccacctctacacccgtgagcatcaagcagtaccctatgtctcaggaggccagactgggcatcaagcctcacatccagaggctgctggaccagggcatcctggtgccatgccagagcccctggaacacaccactgctgcccgtgaagaagccaggcaccaatgactatagacccgtgcaggatctgagagaggtgaacaagagggtggaggatatccaccccaccgtgcccaacccttacaatctgctgtccggcctgcccccttctcaccagtggtatacagtgctggacctgaaggatgccttcttttgtctgagactgcaccctaccagccagccactgttcgcctttgagtggagggaccctgagatgggcatctctggccagctgacctggacacgcctgcctcagggcttcaagaatagcccaacactgtttaacgaggccctgcaccgcgacctggcagatttccggatccagcacccagatctgatcctgctgcagtacgtggacgatctgctgctggccgccaccagcgagctggattgccagcagggaacacgcgccctgctgcagaccctgggaaacctgggatatagggcatccgccaagaaggcccagatctgtcagaagcaggtgaagtacctgggctatctgctgaaggagggccagagatggctgacagaggccaggaaggagacagtgatgggccagccaacacccaagaccccaagacagctgagggagttcctgggcaaagcaggattttgcaggctgttcatcccaggattcgcagagatggcagcacctctgtacccactgaccaagccgggcaccctgtttaattggggccctgaccagcagaaggcctatcaggagatcaagcaggccctgctgacagcaccagccctgggcctgccagacctgaccaagcctttcgagctgtttgtggatgagaagcagggctacgccaagggcgtgctgacccagaagctgggaccatggagacggcccgtggcctatctgtccaagaagctggacccagtggcagcaggatggccaccatgcctgaggatggtggcagcaatcgccgtgctgacaaaggatgccggcaagctgaccatgggacagccactggtcatcctggcaccacacgcagtggaggccctggtgaagcagcctccagatcgctggctgtctaacgcccggatgacacactaccaggccctgctgctggacaccgatcgcgtgcagtttggccctgtggtggccctgaatccagccaccctgctgcctctgccagaggagggcctgcagcacaactgtctggacatcctggcagaggcacacggaacaaggccagacctgaccgatcagcccctgcctgacgccgatcacacatggtataccgatggaagctccctgctgcaggagggccagaggaaggcaggagcagcagtgaccacagagacagaagtgatctgggccaaggccctgccagcaggcacatccgcccagcgggccgagctgatcgccctgacccaggccctgaagatggccgagggcaagaagctgaacgtgtacacagactccagatatgccttcgccaccgcacacatccacggagagatctacaggcgccggggctggctgacctctgagggcaaggagatcaagaacaaggatgagatcctggccctgctgaaggccctgtttctgcccaagcggctgagcatcatccactgtcctggacaccagaagggacactccgccgaggcaaggggcaatcggatggccgaccaggccgccagaaaggctgctattactgaaactcccgacacttccactctgctgattgaaaactcctccccttctggcggctcaaaaagaaccgccgacggcagcgaattcgagtctcccaagaagaagaggaaagtcggctctggccctgccgctaagagagtgaagctggactgagctggagcctcggtggccatgcttcttgccccttgggcctccccccagcccctcctccccttcctgcacccgtacccccgtggtctttgaataaagtctgagtgggcggccactcctccatggtgatataaagaccacccacttccttcgggtgagcccctaagccatggttgtactgcactatcatcctaagacggtccttcttcggatcgcaatctcaccctggtgccgcgcttccttcgggaactgcacccgcggaccagggccgtctttgaacttttctaactgttcttacaaaaaaaaaaaaaaataaaaaaaaaaaaaaaaaaaaaaaaaaattaaaaaaaaaaaaaaaaaaaaaaaaaaaaaaaaaaattttaaaaaaaaaaaaaaaaaaaaaaaaaaaaaaaaaaaaaaaaaaaaaa

SEQ ID NO: 233 - RNA, 6748 nt, synthetic construct
  source 1..6748: mol_type = other RNA
aggaaataagagagaaaagaagagtaagaagaaatataagagccaccatgaaacggacagccgacggaagcgagttcgagtcaccaaagaagaagcggaaagtcgacaagaagtacagcatcggcctggacatcggcaccaactctgtgggctgggccgtgatcaccgacgagtacaaggtgcccagcaagaaattcaaggtgctgggcaacaccgaccggcacagcatcaagaagaacctgatcggagccctgctgttcgacagcggcgaaacagccgaggccacccggctgaagagaaccgccagaagaagatacaccagacggaagaaccggatctgctatctgcaagagatcttcagcaacgagatggccaaggtggacgacagcttcttccacagactggaagagtccttcctggtggaagaggataagaagcacgagcggcaccccatcttcggcaacatcgtggacgaggtggcctaccacgagaagtaccccaccatctaccacctgagaaagaaactggtggacagcaccgacaaggccgacctgcggctgatctatctggccctggcccacatgatcaagttccggggccacttcctgatcgagggcgacctgaaccccgacaacagcgacgtggacaagctgttcatccagctggtgcagacctacaaccagctgttcgaggaaaaccccatcaacgccagcggcgtggacgccaaggccatcctgtctgccagactgagcaagagcagaaagctggaaaatctgatcgcccagctgcccggcgagaagaagaatggcctgttcggaaacctgattgccctgagcctgggcctgacccccaacttcaagagcaacttcgacctggccgaggatgccaaactgcagctgagcaaggacacctacgacgacgacctggacaacctgctggcccagatcggcgaccagtacgccgacctgtttctggccgccaagaacctgtccgacgccatcctgctgagcgacatcctgagagtgaacaccgagatcaccaaggcccccctgagcgcctctatgatcaagagatacgacgagcaccaccaggacctgaccctgctgaaagctctcgtgcggcagcagctgcctgagaagtacaaagagattttcttcgaccagagcaagaacggctacgccggctacattgacggcggagccagccaggaagagttctacaagttcatcaagcccatcctggaaaagatggacggcaccgaggaactgctcgtgaagctgaagagagaggacctgctgcggaagcagcggaccttcgacaacggcagcatcccccaccagatccacctgggagagctgcacgccattctgcggcggcaggaagatttttacccattcctgaaggacaaccgggaaaagatcgagaagatcctgaccttccgcatcccctactacgtgggccctctggccaggggaaacagcagattcgcctggatgaccagaaagagcgaggaaaccatcaccccctggaacttcgaggaagtggtggacaagggcgcttccgcccagagcttcatcgagcggatgaccaacttcgataagaacctgcccaacgagaaggtgctgcccaagcacagcctgctgtacgagtacttcaccgtgtataacgagctgaccaaagtgaaatacgtgaccgagggaatgagaaagcccgccttcctgagcggcgagcagaaaaaggccatcgtggacctgctgttcaagaccaaccggaaagtgaccgtgaagcagctgaaagaggactacttcaagaaaatcgagtgcttcgactccgtggaaatctccggcgtggaagatcggttcaacgcctccctgggcacataccacgatctgctgaaaattatcaaggacaaggacttcctggacaatgaggaaaacgaggacattctggaagatatcgtgctgaccctgacactgtttgaggacagagagatgatcgaggaacggctgaaaacctatgcccacctgttcgacgacaaagtgatgaagcagctgaagcggcggagatacaccggctggggcaggctgagccggaagctgatcaacggcatccgggacaagcagtccggcaagacaatcctggatttcctgaagtccgacggcttcgccaacagaaacttcatgcagctgatccacgacgacagcctgacctttaaagaggacatccagaaagcccaggtgtccggccagggcgatagcctgcacgagcacattgccaatctggccggcagccccgccattaagaagggcatcctgcagacagtgaaggtggtggacgagctcgtgaaagtgatgggccggcacaagcccgagaacatcgtgatcgaaatggccagagagaaccagaccacccagaagggacagaagaacagccgcgagagaatgaagcggatcgaagagggcatcaaagagctgggcagccagatcctgaaagaacaccccgtggaaaacacccagctgcagaacgagaagctgtacctgtactacctgcagaatgggcgggatatgtacgtggaccaggaactggacatcaaccggctgtccgactacgatgtggacgctatcgtgcctcagagctttctgaaggacgactccatcgacaacaaggtgctgaccagaagcgacaagaaccggggcaagagcgacaacgtgccctccgaagaggtcgtgaagaagatgaagaactactggcggcagctgctgaacgccaagctgattacccagagaaagttcgacaatctgaccaaggccgagagaggcggcctgagcgaactggataaggccggcttcatcaagagacagctggtggaaacccggcagatcacaaagcacgtggcacagatcctggactcccggatgaacactaagtacgacgagaatgacaagctgatccgggaagtgaaagtgatcaccctgaagtccaagctggtgtccgatttccggaaggatttccagttttacaaagtgcgcgagatcaacaactaccaccacgcccacgacgcctacctgaacgccgtcgtgggaaccgccctgatcaaaaagtaccctaagctggaaagcgagttcgtgtacggcgactacaaggtgtacgacgtgcggaagatgatcgccaagagcgagcaggaaatcggcaaggctaccgccaagtacttcttctacagcaacatcatgaactttttcaagaccgagattaccctggccaacggcgagatccggaagcggcctctgatcgagacaaacggcgaaaccggggagatcgtgtgggataagggccgggattttgccaccgtgcggaaagtgctgagcatgccccaagtgaatatcgtgaaaaagaccgaggtgcagacaggcggcttcagcaaagagtctatcctgcccaagaggaacagcgataagctgatcgccagaaagaaggactgggaccctaagaagtacggcggcttcgacagccccaccgtggcctattctgtgctggtggtggccaaagtggaaaagggcaagtccaagaaactgaagagtgtgaaagagctgctggggatcaccatcatggaaagaagcagcttcgagaagaatcccatcgactttctggaagccaagggctacaaagaagtgaaaaaggacctgatcatcaagctgcctaagtactccctgttcgagctggaaaacggccggaagagaatgctggcctctgccggcgaactgcagaagggaaacgaactggccctgccctccaaatatgtgaacttcctgtacctggccagccactatgagaagctgaagggctcccccgaggataatgagcagaaacagctgtttgtggaacagcacaagcactacctggacgagatcatcgagcagatcagcgagttctccaagagagtgatcctggccgacgctaatctggacaaagtgctgtccgcctacaacaagcaccgggataagcccatcagagagcaggccgagaatatcatccacctgtttaccctgaccaatctgggagcccctgccgccttcaagtactttgacaccaccatcgaccggaagaggtacaccagcaccaaagaggtgctggacgccaccctgatccaccagagcatcaccggcctgtacgagacacggatcgacctgtctcagctgggaggtgactccggcggaagctctggtggcagcaagcggaccgccgacggctctgaattcgagagccctaagaagaaaagaaaggtgagcggaggctctagcggcggaagcaccctgaacattgaagacgagtatagactgcatgaaacaagcaaggaacccgacgtgtccctgggctccacctggctgtccgactttccccaggcctgggccgagacaggaggaatgggcctggccgtgcggcaggcacccctgatcatccctctgaaggccacctctacacccgtgagcatcaagcagtaccctatgtctcaggaggccagactgggcatcaagcctcacatccagaggctgctggaccagggcatcctggtgccatgccagagcccctggaacacaccactgctgcccgtgaagaagccaggcaccaatgactatagacccgtgcaggatctgagagaggtgaacaagagggtggaggatatccaccccaccgtgcccaacccttacaatctgctgtccggcctgcccccttctcaccagtggtatacagtgctggacctgaaggatgccttcttttgtctgagactgcaccctaccagccagccactgttcgcctttgagtggagggaccctgagatgggcatctctggccagctgacctggacacgcctgcctcagggcttcaagaatagcccaacactgtttaacgaggccctgcaccgcgacctggcagatttccggatccagcacccagatctgatcctgctgcagtacgtggacgatctgctgctggccgccaccagcgagctggattgccagcagggaacacgcgccctgctgcagaccctgggaaacctgggatatagggcatccgccaagaaggcccagatctgtcagaagcaggtgaagtacctgggctatctgctgaaggagggccagagatggctgacagaggccaggaaggagacagtgatgggccagccaacacccaagaccccaagacagctgagggagttcctgggcaaagcaggattttgcaggctgttcatcccaggattcgcagagatggcagcacctctgtacccactgaccaagccgggcaccctgtttaattggggccctgaccagcagaaggcctatcaggagatcaagcaggccctgctgacagcaccagccctgggcctgccagacctgaccaagcctttcgagctgtttgtggatgagaagcagggctacgccaagggcgtgctgacccagaagctgggaccatggagacggcccgtggcctatctgtccaagaagctggacccagtggcagcaggatggccaccatgcctgaggatggtggcagcaatcgccgtgctgacaaaggatgccggcaagctgaccatgggacagccactggtcatcctggcaccacacgcagtggaggccctggtgaagcagcctccagatcgctggctgtctaacgcccggatgacacactaccaggccctgctgctggacaccgatcgcgtgcagtttggccctgtggtggccctgaatccagccaccctgctgcctctgccagaggagggcctgcagcacaactgtctggacatcctggcagaggcacacggaacaaggccagacctgaccgatcagcccctgcctgacgccgatcacacatggtataccgatggaagctccctgctgcaggagggccagaggaaggcaggagcagcagtgaccacagagacagaagtgatctgggccaaggccctgccagcaggcacatccgcccagcgggccgagctgatcgccctgacccaggccctgaagatggccgagggcaagaagctgaacgtgtacacagactccagatatgccttcgccaccgcacacatccacggagagatctacaggcgccggggctggctgacctctgagggcaaggagatcaagaacaaggatgagatcctggccctgctgaaggccctgtttctgcccaagcggctgagcatcatccactgtcctggacaccagaagggacactccgccgaggcaaggggcaatcggatggccgaccaggccgccagaaaggctgctattactgaaactcccgacacttccactctgctgattgaaaactcctccccttctggcggctcaaaaagaaccgccgacggcagcgaattcgagtctcccaagaagaagaggaaagtcggctctggccctgccgctaagagagtgaagctggactgacactcctccatggtgatataaagaccacccacttccttcgggtgagcccctaagccatggttgtactgcactatcatcctaagacggtccttcttcggatcgcaatctcaccctggtgccgcgcttccttcgggaactgcacccgcggaccagggccgtctttgaacttttctaactgttcttacaaaaaaaaaaaaaaaaaaaaaaaaaaaaaaaaaaaaaaaaaaaaaaaaaaaaaaaaaaaaaaaaaaaaaaaaaaaaaaaaaaaaaaaaaaaaaaaaaaaaaaaaaaaaaaaaaaaaaaaa

SEQ ID NO: 234 - RNA, 6758 nt, synthetic construct
  source 1..6758: mol_type = other RNA
aggaaataagagagaaaagaagagtaagaagaaatataagagccaccatgaaacggacagccgacggaagcgagttcgagtcaccaaagaagaagcggaaagtcgacaagaagtacagcatcggcctggacatcggcaccaactctgtgggctgggccgtgatcaccgacgagtacaaggtgcccagcaagaaattcaaggtgctgggcaacaccgaccggcacagcatcaagaagaacctgatcggagccctgctgttcgacagcggcgaaacagccgaggccacccggctgaagagaaccgccagaagaagatacaccagacggaagaaccggatctgctatctgcaagagatcttcagcaacgagatggccaaggtggacgacagcttcttccacagactggaagagtccttcctggtggaagaggataagaagcacgagcggcaccccatcttcggcaacatcgtggacgaggtggcctaccacgagaagtaccccaccatctaccacctgagaaagaaactggtggacagcaccgacaaggccgacctgcggctgatctatctggccctggcccacatgatcaagttccggggccacttcctgatcgagggcgacctgaaccccgacaacagcgacgtggacaagctgttcatccagctggtgcagacctacaaccagctgttcgaggaaaaccccatcaacgccagcggcgtggacgccaaggccatcctgtctgccagactgagcaagagcagaaagctggaaaatctgatcgcccagctgcccggcgagaagaagaatggcctgttcggaaacctgattgccctgagcctgggcctgacccccaacttcaagagcaacttcgacctggccgaggatgccaaactgcagctgagcaaggacacctacgacgacgacctggacaacctgctggcccagatcggcgaccagtacgccgacctgtttctggccgccaagaacctgtccgacgccatcctgctgagcgacatcctgagagtgaacaccgagatcaccaaggcccccctgagcgcctctatgatcaagagatacgacgagcaccaccaggacctgaccctgctgaaagctctcgtgcggcagcagctgcctgagaagtacaaagagattttcttcgaccagagcaagaacggctacgccggctacattgacggcggagccagccaggaagagttctacaagttcatcaagcccatcctggaaaagatggacggcaccgaggaactgctcgtgaagctgaagagagaggacctgctgcggaagcagcggaccttcgacaacggcagcatcccccaccagatccacctgggagagctgcacgccattctgcggcggcaggaagatttttacccattcctgaaggacaaccgggaaaagatcgagaagatcctgaccttccgcatcccctactacgtgggccctctggccaggggaaacagcagattcgcctggatgaccagaaagagcgaggaaaccatcaccccctggaacttcgaggaagtggtggacaagggcgcttccgcccagagcttcatcgagcggatgaccaacttcgataagaacctgcccaacgagaaggtgctgcccaagcacagcctgctgtacgagtacttcaccgtgtataacgagctgaccaaagtgaaatacgtgaccgagggaatgagaaagcccgccttcctgagcggcgagcagaaaaaggccatcgtggacctgctgttcaagaccaaccggaaagtgaccgtgaagcagctgaaagaggactacttcaagaaaatcgagtgcttcgactccgtggaaatctccggcgtggaagatcggttcaacgcctccctgggcacataccacgatctgctgaaaattatcaaggacaaggacttcctggacaatgaggaaaacgaggacattctggaagatatcgtgctgaccctgacactgtttgaggacagagagatgatcgaggaacggctgaaaacctatgcccacctgttcgacgacaaagtgatgaagcagctgaagcggcggagatacaccggctggggcaggctgagccggaagctgatcaacggcatccgggacaagcagtccggcaagacaatcctggatttcctgaagtccgacggcttcgccaacagaaacttcatgcagctgatccacgacgacagcctgacctttaaagaggacatccagaaagcccaggtgtccggccagggcgatagcctgcacgagcacattgccaatctggccggcagccccgccattaagaagggcatcctgcagacagtgaaggtggtggacgagctcgtgaaagtgatgggccggcacaagcccgagaacatcgtgatcgaaatggccagagagaaccagaccacccagaagggacagaagaacagccgcgagagaatgaagcggatcgaagagggcatcaaagagctgggcagccagatcctgaaagaacaccccgtggaaaacacccagctgcagaacgagaagctgtacctgtactacctgcagaatgggcgggatatgtacgtggaccaggaactggacatcaaccggctgtccgactacgatgtggacgctatcgtgcctcagagctttctgaaggacgactccatcgacaacaaggtgctgaccagaagcgacaagaaccggggcaagagcgacaacgtgccctccgaagaggtcgtgaagaagatgaagaactactggcggcagctgctgaacgccaagctgattacccagagaaagttcgacaatctgaccaaggccgagagaggcggcctgagcgaactggataaggccggcttcatcaagagacagctggtggaaacccggcagatcacaaagcacgtggcacagatcctggactcccggatgaacactaagtacgacgagaatgacaagctgatccgggaagtgaaagtgatcaccctgaagtccaagctggtgtccgatttccggaaggatttccagttttacaaagtgcgcgagatcaacaactaccaccacgcccacgacgcctacctgaacgccgtcgtgggaaccgccctgatcaaaaagtaccctaagctggaaagcgagttcgtgtacggcgactacaaggtgtacgacgtgcggaagatgatcgccaagagcgagcaggaaatcggcaaggctaccgccaagtacttcttctacagcaacatcatgaactttttcaagaccgagattaccctggccaacggcgagatccggaagcggcctctgatcgagacaaacggcgaaaccggggagatcgtgtgggataagggccgggattttgccaccgtgcggaaagtgctgagcatgccccaagtgaatatcgtgaaaaagaccgaggtgcagacaggcggcttcagcaaagagtctatcctgcccaagaggaacagcgataagctgatcgccagaaagaaggactgggaccctaagaagtacggcggcttcgacagccccaccgtggcctattctgtgctggtggtggccaaagtggaaaagggcaagtccaagaaactgaagagtgtgaaagagctgctggggatcaccatcatggaaagaagcagcttcgagaagaatcccatcgactttctggaagccaagggctacaaagaagtgaaaaaggacctgatcatcaagctgcctaagtactccctgttcgagctggaaaacggccggaagagaatgctggcctctgccggcgaactgcagaagggaaacgaactggccctgccctccaaatatgtgaacttcctgtacctggccagccactatgagaagctgaagggctcccccgaggataatgagcagaaacagctgtttgtggaacagcacaagcactacctggacgagatcatcgagcagatcagcgagttctccaagagagtgatcctggccgacgctaatctggacaaagtgctgtccgcctacaacaagcaccgggataagcccatcagagagcaggccgagaatatcatccacctgtttaccctgaccaatctgggagcccctgccgccttcaagtactttgacaccaccatcgaccggaagaggtacaccagcaccaaagaggtgctggacgccaccctgatccaccagagcatcaccggcctgtacgagacacggatcgacctgtctcagctgggaggtgactccggcggaagctctggtggcagcaagcggaccgccgacggctctgaattcgagagccctaagaagaaaagaaaggtgagcggaggctctagcggcggaagcaccctgaacattgaagacgagtatagactgcatgaaacaagcaaggaacccgacgtgtccctgggctccacctggctgtccgactttccccaggcctgggccgagacaggaggaatgggcctggccgtgcggcaggcacccctgatcatccctctgaaggccacctctacacccgtgagcatcaagcagtaccctatgtctcaggaggccagactgggcatcaagcctcacatccagaggctgctggaccagggcatcctggtgccatgccagagcccctggaacacaccactgctgcccgtgaagaagccaggcaccaatgactatagacccgtgcaggatctgagagaggtgaacaagagggtggaggatatccaccccaccgtgcccaacccttacaatctgctgtccggcctgcccccttctcaccagtggtatacagtgctggacctgaaggatgccttcttttgtctgagactgcaccctaccagccagccactgttcgcctttgagtggagggaccctgagatgggcatctctggccagctgacctggacacgcctgcctcagggcttcaagaatagcccaacactgtttaacgaggccctgcaccgcgacctggcagatttccggatccagcacccagatctgatcctgctgcagtacgtggacgatctgctgctggccgccaccagcgagctggattgccagcagggaacacgcgccctgctgcagaccctgggaaacctgggatatagggcatccgccaagaaggcccagatctgtcagaagcaggtgaagtacctgggctatctgctgaaggagggccagagatggctgacagaggccaggaaggagacagtgatgggccagccaacacccaagaccccaagacagctgagggagttcctgggcaaagcaggattttgcaggctgttcatcccaggattcgcagagatggcagcacctctgtacccactgaccaagccgggcaccctgtttaattggggccctgaccagcagaaggcctatcaggagatcaagcaggccctgctgacagcaccagccctgggcctgccagacctgaccaagcctttcgagctgtttgtggatgagaagcagggctacgccaagggcgtgctgacccagaagctgggaccatggagacggcccgtggcctatctgtccaagaagctggacccagtggcagcaggatggccaccatgcctgaggatggtggcagcaatcgccgtgctgacaaaggatgccggcaagctgaccatgggacagccactggtcatcctggcaccacacgcagtggaggccctggtgaagcagcctccagatcgctggctgtctaacgcccggatgacacactaccaggccctgctgctggacaccgatcgcgtgcagtttggccctgtggtggccctgaatccagccaccctgctgcctctgccagaggagggcctgcagcacaactgtctggacatcctggcagaggcacacggaacaaggccagacctgaccgatcagcccctgcctgacgccgatcacacatggtataccgatggaagctccctgctgcaggagggccagaggaaggcaggagcagcagtgaccacagagacagaagtgatctgggccaaggccctgccagcaggcacatccgcccagcgggccgagctgatcgccctgacccaggccctgaagatggccgagggcaagaagctgaacgtgtacacagactccagatatgccttcgccaccgcacacatccacggagagatctacaggcgccggggctggctgacctctgagggcaaggagatcaagaacaaggatgagatcctggccctgctgaaggccctgtttctgcccaagcggctgagcatcatccactgtcctggacaccagaagggacactccgccgaggcaaggggcaatcggatggccgaccaggccgccagaaaggctgctattactgaaactcccgacacttccactctgctgattgaaaactcctccccttctggcggctcaaaaagaaccgccgacggcagcgaattcgagtctcccaagaagaagaggaaagtcggctctggccctgccgctaagagagtgaagctggactgacactcctccatggtgatataaagaccacccacttccttcgggtgagcccctaagccatggttgtactgcactatcatcctaagacggtccttcttcggatcgcaatctcaccctggtgccgcgcttccttcgggaactgcacccgcggaccagggccgtctttgaacttttctaactgttcttacaaaaaaaaaaaaaaaaaaaaaaaaaaaaaaaaaaaaaaaaaaaaaaaaaaaaaaaaaaaaaaaaaaaaaaaaaaaaaaaaaaaaaaaaaaaaaaaaaaaaaaaaaaaaaaaaaaaaaaaaaaaaaaaaaa

SEQ ID NO: 235 - RNA, 6748 nt, synthetic construct
  source 1..6748: mol_type = other RNA
aggaaataagagagaaaagaagagtaagaagaaatataagagccaccatgaaacggacagccgacggaagcgagttcgagtcaccaaagaagaagcggaaagtcgacaagaagtacagcatcggcctggacatcggcaccaactctgtgggctgggccgtgatcaccgacgagtacaaggtgcccagcaagaaattcaaggtgctgggcaacaccgaccggcacagcatcaagaagaacctgatcggagccctgctgttcgacagcggcgaaacagccgaggccacccggctgaagagaaccgccagaagaagatacaccagacggaagaaccggatctgctatctgcaagagatcttcagcaacgagatggccaaggtggacgacagcttcttccacagactggaagagtccttcctggtggaagaggataagaagcacgagcggcaccccatcttcggcaacatcgtggacgaggtggcctaccacgagaagtaccccaccatctaccacctgagaaagaaactggtggacagcaccgacaaggccgacctgcggctgatctatctggccctggcccacatgatcaagttccggggccacttcctgatcgagggcgacctgaaccccgacaacagcgacgtggacaagctgttcatccagctggtgcagacctacaaccagctgttcgaggaaaaccccatcaacgccagcggcgtggacgccaaggccatcctgtctgccagactgagcaagagcagaaagctggaaaatctgatcgcccagctgcccggcgagaagaagaatggcctgttcggaaacctgattgccctgagcctgggcctgacccccaacttcaagagcaacttcgacctggccgaggatgccaaactgcagctgagcaaggacacctacgacgacgacctggacaacctgctggcccagatcggcgaccagtacgccgacctgtttctggccgccaagaacctgtccgacgccatcctgctgagcgacatcctgagagtgaacaccgagatcaccaaggcccccctgagcgcctctatgatcaagagatacgacgagcaccaccaggacctgaccctgctgaaagctctcgtgcggcagcagctgcctgagaagtacaaagagattttcttcgaccagagcaagaacggctacgccggctacattgacggcggagccagccaggaagagttctacaagttcatcaagcccatcctggaaaagatggacggcaccgaggaactgctcgtgaagctgaagagagaggacctgctgcggaagcagcggaccttcgacaacggcagcatcccccaccagatccacctgggagagctgcacgccattctgcggcggcaggaagatttttacccattcctgaaggacaaccgggaaaagatcgagaagatcctgaccttccgcatcccctactacgtgggccctctggccaggggaaacagcagattcgcctggatgaccagaaagagcgaggaaaccatcaccccctggaacttcgaggaagtggtggacaagggcgcttccgcccagagcttcatcgagcggatgaccaacttcgataagaacctgcccaacgagaaggtgctgcccaagcacagcctgctgtacgagtacttcaccgtgtataacgagctgaccaaagtgaaatacgtgaccgagggaatgagaaagcccgccttcctgagcggcgagcagaaaaaggccatcgtggacctgctgttcaagaccaaccggaaagtgaccgtgaagcagctgaaagaggactacttcaagaaaatcgagtgcttcgactccgtggaaatctccggcgtggaagatcggttcaacgcctccctgggcacataccacgatctgctgaaaattatcaaggacaaggacttcctggacaatgaggaaaacgaggacattctggaagatatcgtgctgaccctgacactgtttgaggacagagagatgatcgaggaacggctgaaaacctatgcccacctgttcgacgacaaagtgatgaagcagctgaagcggcggagatacaccggctggggcaggctgagccggaagctgatcaacggcatccgggacaagcagtccggcaagacaatcctggatttcctgaagtccgacggcttcgccaacagaaacttcatgcagctgatccacgacgacagcctgacctttaaagaggacatccagaaagcccaggtgtccggccagggcgatagcctgcacgagcacattgccaatctggccggcagccccgccattaagaagggcatcctgcagacagtgaaggtggtggacgagctcgtgaaagtgatgggccggcacaagcccgagaacatcgtgatcgaaatggccagagagaaccagaccacccagaagggacagaagaacagccgcgagagaatgaagcggatcgaagagggcatcaaagagctgggcagccagatcctgaaagaacaccccgtggaaaacacccagctgcagaacgagaagctgtacctgtactacctgcagaatgggcgggatatgtacgtggaccaggaactggacatcaaccggctgtccgactacgatgtggacgctatcgtgcctcagagctttctgaaggacgactccatcgacaacaaggtgctgaccagaagcgacaagaaccggggcaagagcgacaacgtgccctccgaagaggtcgtgaagaagatgaagaactactggcggcagctgctgaacgccaagctgattacccagagaaagttcgacaatctgaccaaggccgagagaggcggcctgagcgaactggataaggccggcttcatcaagagacagctggtggaaacccggcagatcacaaagcacgtggcacagatcctggactcccggatgaacactaagtacgacgagaatgacaagctgatccgggaagtgaaagtgatcaccctgaagtccaagctggtgtccgatttccggaaggatttccagttttacaaagtgcgcgagatcaacaactaccaccacgcccacgacgcctacctgaacgccgtcgtgggaaccgccctgatcaaaaagtaccctaagctggaaagcgagttcgtgtacggcgactacaaggtgtacgacgtgcggaagatgatcgccaagagcgagcaggaaatcggcaaggctaccgccaagtacttcttctacagcaacatcatgaactttttcaagaccgagattaccctggccaacggcgagatccggaagcggcctctgatcgagacaaacggcgaaaccggggagatcgtgtgggataagggccgggattttgccaccgtgcggaaagtgctgagcatgccccaagtgaatatcgtgaaaaagaccgaggtgcagacaggcggcttcagcaaagagtctatcctgcccaagaggaacagcgataagctgatcgccagaaagaaggactgggaccctaagaagtacggcggcttcgacagccccaccgtggcctattctgtgctggtggtggccaaagtggaaaagggcaagtccaagaaactgaagagtgtgaaagagctgctggggatcaccatcatggaaagaagcagcttcgagaagaatcccatcgactttctggaagccaagggctacaaagaagtgaaaaaggacctgatcatcaagctgcctaagtactccctgttcgagctggaaaacggccggaagagaatgctggcctctgccggcgaactgcagaagggaaacgaactggccctgccctccaaatatgtgaacttcctgtacctggccagccactatgagaagctgaagggctcccccgaggataatgagcagaaacagctgtttgtggaacagcacaagcactacctggacgagatcatcgagcagatcagcgagttctccaagagagtgatcctggccgacgctaatctggacaaagtgctgtccgcctacaacaagcaccgggataagcccatcagagagcaggccgagaatatcatccacctgtttaccctgaccaatctgggagcccctgccgccttcaagtactttgacaccaccatcgaccggaagaggtacaccagcaccaaagaggtgctggacgccaccctgatccaccagagcatcaccggcctgtacgagacacggatcgacctgtctcagctgggaggtgactccggcggaagctctggtggcagcaagcggaccgccgacggctctgaattcgagagccctaagaagaaaagaaaggtgagcggaggctctagcggcggaagcaccctgaacattgaagacgagtatagactgcatgaaacaagcaaggaacccgacgtgtccctgggctccacctggctgtccgactttccccaggcctgggccgagacaggaggaatgggcctggccgtgcggcaggcacccctgatcatccctctgaaggccacctctacacccgtgagcatcaagcagtaccctatgtctcaggaggccagactgggcatcaagcctcacatccagaggctgctggaccagggcatcctggtgccatgccagagcccctggaacacaccactgctgcccgtgaagaagccaggcaccaatgactatagacccgtgcaggatctgagagaggtgaacaagagggtggaggatatccaccccaccgtgcccaacccttacaatctgctgtccggcctgcccccttctcaccagtggtatacagtgctggacctgaaggatgccttcttttgtctgagactgcaccctaccagccagccactgttcgcctttgagtggagggaccctgagatgggcatctctggccagctgacctggacacgcctgcctcagggcttcaagaatagcccaacactgtttaacgaggccctgcaccgcgacctggcagatttccggatccagcacccagatctgatcctgctgcagtacgtggacgatctgctgctggccgccaccagcgagctggattgccagcagggaacacgcgccctgctgcagaccctgggaaacctgggatatagggcatccgccaagaaggcccagatctgtcagaagcaggtgaagtacctgggctatctgctgaaggagggccagagatggctgacagaggccaggaaggagacagtgatgggccagccaacacccaagaccccaagacagctgagggagttcctgggcaaagcaggattttgcaggctgttcatcccaggattcgcagagatggcagcacctctgtacccactgaccaagccgggcaccctgtttaattggggccctgaccagcagaaggcctatcaggagatcaagcaggccctgctgacagcaccagccctgggcctgccagacctgaccaagcctttcgagctgtttgtggatgagaagcagggctacgccaagggcgtgctgacccagaagctgggaccatggagacggcccgtggcctatctgtccaagaagctggacccagtggcagcaggatggccaccatgcctgaggatggtggcagcaatcgccgtgctgacaaaggatgccggcaagctgaccatgggacagccactggtcatcctggcaccacacgcagtggaggccctggtgaagcagcctccagatcgctggctgtctaacgcccggatgacacactaccaggccctgctgctggacaccgatcgcgtgcagtttggccctgtggtggccctgaatccagccaccctgctgcctctgccagaggagggcctgcagcacaactgtctggacatcctggcagaggcacacggaacaaggccagacctgaccgatcagcccctgcctgacgccgatcacacatggtataccgatggaagctccctgctgcaggagggccagaggaaggcaggagcagcagtgaccacagagacagaagtgatctgggccaaggccctgccagcaggcacatccgcccagcgggccgagctgatcgccctgacccaggccctgaagatggccgagggcaagaagctgaacgtgtacacagactccagatatgccttcgccaccgcacacatccacggagagatctacaggcgccggggctggctgacctctgagggcaaggagatcaagaacaaggatgagatcctggccctgctgaaggccctgtttctgcccaagcggctgagcatcatccactgtcctggacaccagaagggacactccgccgaggcaaggggcaatcggatggccgaccaggccgccagaaaggctgctattactgaaactcccgacacttccactctgctgattgaaaactcctccccttctggcggctcaaaaagaaccgccgacggcagcgaattcgagtctcccaagaagaagaggaaagtcggctctggccctgccgctaagagagtgaagctggactgacactcctccatggtgatataaagaccacccacttccttcgggtgagcccctaagccatggttgtactgcactatcatcctaagacggtccttcttcggatcgcaatctcaccctggtgccgcgcttccttcgggaactgcacccgcggaccagggccgtctttgaacttttctaactgttcttacaaaaaaaaaaaaaaaaaaaaaaaaaaaaaagcatatgactaaaaaaaaaaaaaaaaaaaaaaaaaaaaaaaaaaaaaaaaaaaaaaaaaaaaaaaaaaaaaaaaaaaaaaaaaaaaaaaa

SEQ ID NO: 236 - RNA, 6758 nt, synthetic construct
  source 1..6758: mol_type = other RNA
aggaaataagagagaaaagaagagtaagaagaaatataagagccaccatgaaacggacagccgacggaagcgagttcgagtcaccaaagaagaagcggaaagtcgacaagaagtacagcatcggcctggacatcggcaccaactctgtgggctgggccgtgatcaccgacgagtacaaggtgcccagcaagaaattcaaggtgctgggcaacaccgaccggcacagcatcaagaagaacctgatcggagccctgctgttcgacagcggcgaaacagccgaggccacccggctgaagagaaccgccagaagaagatacaccagacggaagaaccggatctgctatctgcaagagatcttcagcaacgagatggccaaggtggacgacagcttcttccacagactggaagagtccttcctggtggaagaggataagaagcacgagcggcaccccatcttcggcaacatcgtggacgaggtggcctaccacgagaagtaccccaccatctaccacctgagaaagaaactggtggacagcaccgacaaggccgacctgcggctgatctatctggccctggcccacatgatcaagttccggggccacttcctgatcgagggcgacctgaaccccgacaacagcgacgtggacaagctgttcatccagctggtgcagacctacaaccagctgttcgaggaaaaccccatcaacgccagcggcgtggacgccaaggccatcctgtctgccagactgagcaagagcagaaagctggaaaatctgatcgcccagctgcccggcgagaagaagaatggcctgttcggaaacctgattgccctgagcctgggcctgacccccaacttcaagagcaacttcgacctggccgaggatgccaaactgcagctgagcaaggacacctacgacgacgacctggacaacctgctggcccagatcggcgaccagtacgccgacctgtttctggccgccaagaacctgtccgacgccatcctgctgagcgacatcctgagagtgaacaccgagatcaccaaggcccccctgagcgcctctatgatcaagagatacgacgagcaccaccaggacctgaccctgctgaaagctctcgtgcggcagcagctgcctgagaagtacaaagagattttcttcgaccagagcaagaacggctacgccggctacattgacggcggagccagccaggaagagttctacaagttcatcaagcccatcctggaaaagatggacggcaccgaggaactgctcgtgaagctgaagagagaggacctgctgcggaagcagcggaccttcgacaacggcagcatcccccaccagatccacctgggagagctgcacgccattctgcggcggcaggaagatttttacccattcctgaaggacaaccgggaaaagatcgagaagatcctgaccttccgcatcccctactacgtgggccctctggccaggggaaacagcagattcgcctggatgaccagaaagagcgaggaaaccatcaccccctggaacttcgaggaagtggtggacaagggcgcttccgcccagagcttcatcgagcggatgaccaacttcgataagaacctgcccaacgagaaggtgctgcccaagcacagcctgctgtacgagtacttcaccgtgtataacgagctgaccaaagtgaaatacgtgaccgagggaatgagaaagcccgccttcctgagcggcgagcagaaaaaggccatcgtggacctgctgttcaagaccaaccggaaagtgaccgtgaagcagctgaaagaggactacttcaagaaaatcgagtgcttcgactccgtggaaatctccggcgtggaagatcggttcaacgcctccctgggcacataccacgatctgctgaaaattatcaaggacaaggacttcctggacaatgaggaaaacgaggacattctggaagatatcgtgctgaccctgacactgtttgaggacagagagatgatcgaggaacggctgaaaacctatgcccacctgttcgacgacaaagtgatgaagcagctgaagcggcggagatacaccggctggggcaggctgagccggaagctgatcaacggcatccgggacaagcagtccggcaagacaatcctggatttcctgaagtccgacggcttcgccaacagaaacttcatgcagctgatccacgacgacagcctgacctttaaagaggacatccagaaagcccaggtgtccggccagggcgatagcctgcacgagcacattgccaatctggccggcagccccgccattaagaagggcatcctgcagacagtgaaggtggtggacgagctcgtgaaagtgatgggccggcacaagcccgagaacatcgtgatcgaaatggccagagagaaccagaccacccagaagggacagaagaacagccgcgagagaatgaagcggatcgaagagggcatcaaagagctgggcagccagatcctgaaagaacaccccgtggaaaacacccagctgcagaacgagaagctgtacctgtactacctgcagaatgggcgggatatgtacgtggaccaggaactggacatcaaccggctgtccgactacgatgtggacgctatcgtgcctcagagctttctgaaggacgactccatcgacaacaaggtgctgaccagaagcgacaagaaccggggcaagagcgacaacgtgccctccgaagaggtcgtgaagaagatgaagaactactggcggcagctgctgaacgccaagctgattacccagagaaagttcgacaatctgaccaaggccgagagaggcggcctgagcgaactggataaggccggcttcatcaagagacagctggtggaaacccggcagatcacaaagcacgtggcacagatcctggactcccggatgaacactaagtacgacgagaatgacaagctgatccgggaagtgaaagtgatcaccctgaagtccaagctggtgtccgatttccggaaggatttccagttttacaaagtgcgcgagatcaacaactaccaccacgcccacgacgcctacctgaacgccgtcgtgggaaccgccctgatcaaaaagtaccctaagctggaaagcgagttcgtgtacggcgactacaaggtgtacgacgtgcggaagatgatcgccaagagcgagcaggaaatcggcaaggctaccgccaagtacttcttctacagcaacatcatgaactttttcaagaccgagattaccctggccaacggcgagatccggaagcggcctctgatcgagacaaacggcgaaaccggggagatcgtgtgggataagggccgggattttgccaccgtgcggaaagtgctgagcatgccccaagtgaatatcgtgaaaaagaccgaggtgcagacaggcggcttcagcaaagagtctatcctgcccaagaggaacagcgataagctgatcgccagaaagaaggactgggaccctaagaagtacggcggcttcgacagccccaccgtggcctattctgtgctggtggtggccaaagtggaaaagggcaagtccaagaaactgaagagtgtgaaagagctgctggggatcaccatcatggaaagaagcagcttcgagaagaatcccatcgactttctggaagccaagggctacaaagaagtgaaaaaggacctgatcatcaagctgcctaagtactccctgttcgagctggaaaacggccggaagagaatgctggcctctgccggcgaactgcagaagggaaacgaactggccctgccctccaaatatgtgaacttcctgtacctggccagccactatgagaagctgaagggctcccccgaggataatgagcagaaacagctgtttgtggaacagcacaagcactacctggacgagatcatcgagcagatcagcgagttctccaagagagtgatcctggccgacgctaatctggacaaagtgctgtccgcctacaacaagcaccgggataagcccatcagagagcaggccgagaatatcatccacctgtttaccctgaccaatctgggagcccctgccgccttcaagtactttgacaccaccatcgaccggaagaggtacaccagcaccaaagaggtgctggacgccaccctgatccaccagagcatcaccggcctgtacgagacacggatcgacctgtctcagctgggaggtgactccggcggaagctctggtggcagcaagcggaccgccgacggctctgaattcgagagccctaagaagaaaagaaaggtgagcggaggctctagcggcggaagcaccctgaacattgaagacgagtatagactgcatgaaacaagcaaggaacccgacgtgtccctgggctccacctggctgtccgactttccccaggcctgggccgagacaggaggaatgggcctggccgtgcggcaggcacccctgatcatccctctgaaggccacctctacacccgtgagcatcaagcagtaccctatgtctcaggaggccagactgggcatcaagcctcacatccagaggctgctggaccagggcatcctggtgccatgccagagcccctggaacacaccactgctgcccgtgaagaagccaggcaccaatgactatagacccgtgcaggatctgagagaggtgaacaagagggtggaggatatccaccccaccgtgcccaacccttacaatctgctgtccggcctgcccccttctcaccagtggtatacagtgctggacctgaaggatgccttcttttgtctgagactgcaccctaccagccagccactgttcgcctttgagtggagggaccctgagatgggcatctctggccagctgacctggacacgcctgcctcagggcttcaagaatagcccaacactgtttaacgaggccctgcaccgcgacctggcagatttccggatccagcacccagatctgatcctgctgcagtacgtggacgatctgctgctggccgccaccagcgagctggattgccagcagggaacacgcgccctgctgcagaccctgggaaacctgggatatagggcatccgccaagaaggcccagatctgtcagaagcaggtgaagtacctgggctatctgctgaaggagggccagagatggctgacagaggccaggaaggagacagtgatgggccagccaacacccaagaccccaagacagctgagggagttcctgggcaaagcaggattttgcaggctgttcatcccaggattcgcagagatggcagcacctctgtacccactgaccaagccgggcaccctgtttaattggggccctgaccagcagaaggcctatcaggagatcaagcaggccctgctgacagcaccagccctgggcctgccagacctgaccaagcctttcgagctgtttgtggatgagaagcagggctacgccaagggcgtgctgacccagaagctgggaccatggagacggcccgtggcctatctgtccaagaagctggacccagtggcagcaggatggccaccatgcctgaggatggtggcagcaatcgccgtgctgacaaaggatgccggcaagctgaccatgggacagccactggtcatcctggcaccacacgcagtggaggccctggtgaagcagcctccagatcgctggctgtctaacgcccggatgacacactaccaggccctgctgctggacaccgatcgcgtgcagtttggccctgtggtggccctgaatccagccaccctgctgcctctgccagaggagggcctgcagcacaactgtctggacatcctggcagaggcacacggaacaaggccagacctgaccgatcagcccctgcctgacgccgatcacacatggtataccgatggaagctccctgctgcaggagggccagaggaaggcaggagcagcagtgaccacagagacagaagtgatctgggccaaggccctgccagcaggcacatccgcccagcgggccgagctgatcgccctgacccaggccctgaagatggccgagggcaagaagctgaacgtgtacacagactccagatatgccttcgccaccgcacacatccacggagagatctacaggcgccggggctggctgacctctgagggcaaggagatcaagaacaaggatgagatcctggccctgctgaaggccctgtttctgcccaagcggctgagcatcatccactgtcctggacaccagaagggacactccgccgaggcaaggggcaatcggatggccgaccaggccgccagaaaggctgctattactgaaactcccgacacttccactctgctgattgaaaactcctccccttctggcggctcaaaaagaaccgccgacggcagcgaattcgagtctcccaagaagaagaggaaagtcggctctggccctgccgctaagagagtgaagctggactgacactcctccatggtgatataaagaccacccacttccttcgggtgagcccctaagccatggttgtactgcactatcatcctaagacggtccttcttcggatcgcaatctcaccctggtgccgcgcttccttcgggaactgcacccgcggaccagggccgtctttgaacttttctaactgttcttacaaaaaaaaaaaaaaaaaaaaaaaaaaaaaaaaaaaaaaaagcatatgactaaaaaaaaaaaaaaaaaaaaaaaaaaaaaagcataagactaaaaaaaaaaaaaaaaaaaaaaaaaaaaaaaaaaaaaaaa

SEQ ID NO: 237 - RNA, 6758 nt, synthetic construct
  source 1..6758: mol_type = other RNA
aggaaataagagagaaaagaagagtaagaagaaatataagagccaccatgaaacggacagccgacggaagcgagttcgagtcaccaaagaagaagcggaaagtcgacaagaagtacagcatcggcctggacatcggcaccaactctgtgggctgggccgtgatcaccgacgagtacaaggtgcccagcaagaaattcaaggtgctgggcaacaccgaccggcacagcatcaagaagaacctgatcggagccctgctgttcgacagcggcgaaacagccgaggccacccggctgaagagaaccgccagaagaagatacaccagacggaagaaccggatctgctatctgcaagagatcttcagcaacgagatggccaaggtggacgacagcttcttccacagactggaagagtccttcctggtggaagaggataagaagcacgagcggcaccccatcttcggcaacatcgtggacgaggtggcctaccacgagaagtaccccaccatctaccacctgagaaagaaactggtggacagcaccgacaaggccgacctgcggctgatctatctggccctggcccacatgatcaagttccggggccacttcctgatcgagggcgacctgaaccccgacaacagcgacgtggacaagctgttcatccagctggtgcagacctacaaccagctgttcgaggaaaaccccatcaacgccagcggcgtggacgccaaggccatcctgtctgccagactgagcaagagcagaaagctggaaaatctgatcgcccagctgcccggcgagaagaagaatggcctgttcggaaacctgattgccctgagcctgggcctgacccccaacttcaagagcaacttcgacctggccgaggatgccaaactgcagctgagcaaggacacctacgacgacgacctggacaacctgctggcccagatcggcgaccagtacgccgacctgtttctggccgccaagaacctgtccgacgccatcctgctgagcgacatcctgagagtgaacaccgagatcaccaaggcccccctgagcgcctctatgatcaagagatacgacgagcaccaccaggacctgaccctgctgaaagctctcgtgcggcagcagctgcctgagaagtacaaagagattttcttcgaccagagcaagaacggctacgccggctacattgacggcggagccagccaggaagagttctacaagttcatcaagcccatcctggaaaagatggacggcaccgaggaactgctcgtgaagctgaagagagaggacctgctgcggaagcagcggaccttcgacaacggcagcatcccccaccagatccacctgggagagctgcacgccattctgcggcggcaggaagatttttacccattcctgaaggacaaccgggaaaagatcgagaagatcctgaccttccgcatcccctactacgtgggccctctggccaggggaaacagcagattcgcctggatgaccagaaagagcgaggaaaccatcaccccctggaacttcgaggaagtggtggacaagggcgcttccgcccagagcttcatcgagcggatgaccaacttcgataagaacctgcccaacgagaaggtgctgcccaagcacagcctgctgtacgagtacttcaccgtgtataacgagctgaccaaagtgaaatacgtgaccgagggaatgagaaagcccgccttcctgagcggcgagcagaaaaaggccatcgtggacctgctgttcaagaccaaccggaaagtgaccgtgaagcagctgaaagaggactacttcaagaaaatcgagtgcttcgactccgtggaaatctccggcgtggaagatcggttcaacgcctccctgggcacataccacgatctgctgaaaattatcaaggacaaggacttcctggacaatgaggaaaacgaggacattctggaagatatcgtgctgaccctgacactgtttgaggacagagagatgatcgaggaacggctgaaaacctatgcccacctgttcgacgacaaagtgatgaagcagctgaagcggcggagatacaccggctggggcaggctgagccggaagctgatcaacggcatccgggacaagcagtccggcaagacaatcctggatttcctgaagtccgacggcttcgccaacagaaacttcatgcagctgatccacgacgacagcctgacctttaaagaggacatccagaaagcccaggtgtccggccagggcgatagcctgcacgagcacattgccaatctggccggcagccccgccattaagaagggcatcctgcagacagtgaaggtggtggacgagctcgtgaaagtgatgggccggcacaagcccgagaacatcgtgatcgaaatggccagagagaaccagaccacccagaagggacagaagaacagccgcgagagaatgaagcggatcgaagagggcatcaaagagctgggcagccagatcctgaaagaacaccccgtggaaaacacccagctgcagaacgagaagctgtacctgtactacctgcagaatgggcgggatatgtacgtggaccaggaactggacatcaaccggctgtccgactacgatgtggacgctatcgtgcctcagagctttctgaaggacgactccatcgacaacaaggtgctgaccagaagcgacaagaaccggggcaagagcgacaacgtgccctccgaagaggtcgtgaagaagatgaagaactactggcggcagctgctgaacgccaagctgattacccagagaaagttcgacaatctgaccaaggccgagagaggcggcctgagcgaactggataaggccggcttcatcaagagacagctggtggaaacccggcagatcacaaagcacgtggcacagatcctggactcccggatgaacactaagtacgacgagaatgacaagctgatccgggaagtgaaagtgatcaccctgaagtccaagctggtgtccgatttccggaaggatttccagttttacaaagtgcgcgagatcaacaactaccaccacgcccacgacgcctacctgaacgccgtcgtgggaaccgccctgatcaaaaagtaccctaagctggaaagcgagttcgtgtacggcgactacaaggtgtacgacgtgcggaagatgatcgccaagagcgagcaggaaatcggcaaggctaccgccaagtacttcttctacagcaacatcatgaactttttcaagaccgagattaccctggccaacggcgagatccggaagcggcctctgatcgagacaaacggcgaaaccggggagatcgtgtgggataagggccgggattttgccaccgtgcggaaagtgctgagcatgccccaagtgaatatcgtgaaaaagaccgaggtgcagacaggcggcttcagcaaagagtctatcctgcccaagaggaacagcgataagctgatcgccagaaagaaggactgggaccctaagaagtacggcggcttcgacagccccaccgtggcctattctgtgctggtggtggccaaagtggaaaagggcaagtccaagaaactgaagagtgtgaaagagctgctggggatcaccatcatggaaagaagcagcttcgagaagaatcccatcgactttctggaagccaagggctacaaagaagtgaaaaaggacctgatcatcaagctgcctaagtactccctgttcgagctggaaaacggccggaagagaatgctggcctctgccggcgaactgcagaagggaaacgaactggccctgccctccaaatatgtgaacttcctgtacctggccagccactatgagaagctgaagggctcccccgaggataatgagcagaaacagctgtttgtggaacagcacaagcactacctggacgagatcatcgagcagatcagcgagttctccaagagagtgatcctggccgacgctaatctggacaaagtgctgtccgcctacaacaagcaccgggataagcccatcagagagcaggccgagaatatcatccacctgtttaccctgaccaatctgggagcccctgccgccttcaagtactttgacaccaccatcgaccggaagaggtacaccagcaccaaagaggtgctggacgccaccctgatccaccagagcatcaccggcctgtacgagacacggatcgacctgtctcagctgggaggtgactccggcggaagctctggtggcagcaagcggaccgccgacggctctgaattcgagagccctaagaagaaaagaaaggtgagcggaggctctagcggcggaagcaccctgaacattgaagacgagtatagactgcatgaaacaagcaaggaacccgacgtgtccctgggctccacctggctgtccgactttccccaggcctgggccgagacaggaggaatgggcctggccgtgcggcaggcacccctgatcatccctctgaaggccacctctacacccgtgagcatcaagcagtaccctatgtctcaggaggccagactgggcatcaagcctcacatccagaggctgctggaccagggcatcctggtgccatgccagagcccctggaacacaccactgctgcccgtgaagaagccaggcaccaatgactatagacccgtgcaggatctgagagaggtgaacaagagggtggaggatatccaccccaccgtgcccaacccttacaatctgctgtccggcctgcccccttctcaccagtggtatacagtgctggacctgaaggatgccttcttttgtctgagactgcaccctaccagccagccactgttcgcctttgagtggagggaccctgagatgggcatctctggccagctgacctggacacgcctgcctcagggcttcaagaatagcccaacactgtttaacgaggccctgcaccgcgacctggcagatttccggatccagcacccagatctgatcctgctgcagtacgtggacgatctgctgctggccgccaccagcgagctggattgccagcagggaacacgcgccctgctgcagaccctgggaaacctgggatatagggcatccgccaagaaggcccagatctgtcagaagcaggtgaagtacctgggctatctgctgaaggagggccagagatggctgacagaggccaggaaggagacagtgatgggccagccaacacccaagaccccaagacagctgagggagttcctgggcaaagcaggattttgcaggctgttcatcccaggattcgcagagatggcagcacctctgtacccactgaccaagccgggcaccctgtttaattggggccctgaccagcagaaggcctatcaggagatcaagcaggccctgctgacagcaccagccctgggcctgccagacctgaccaagcctttcgagctgtttgtggatgagaagcagggctacgccaagggcgtgctgacccagaagctgggaccatggagacggcccgtggcctatctgtccaagaagctggacccagtggcagcaggatggccaccatgcctgaggatggtggcagcaatcgccgtgctgacaaaggatgccggcaagctgaccatgggacagccactggtcatcctggcaccacacgcagtggaggccctggtgaagcagcctccagatcgctggctgtctaacgcccggatgacacactaccaggccctgctgctggacaccgatcgcgtgcagtttggccctgtggtggccctgaatccagccaccctgctgcctctgccagaggagggcctgcagcacaactgtctggacatcctggcagaggcacacggaacaaggccagacctgaccgatcagcccctgcctgacgccgatcacacatggtataccgatggaagctccctgctgcaggagggccagaggaaggcaggagcagcagtgaccacagagacagaagtgatctgggccaaggccctgccagcaggcacatccgcccagcgggccgagctgatcgccctgacccaggccctgaagatggccgagggcaagaagctgaacgtgtacacagactccagatatgccttcgccaccgcacacatccacggagagatctacaggcgccggggctggctgacctctgagggcaaggagatcaagaacaaggatgagatcctggccctgctgaaggccctgtttctgcccaagcggctgagcatcatccactgtcctggacaccagaagggacactccgccgaggcaaggggcaatcggatggccgaccaggccgccagaaaggctgctattactgaaactcccgacacttccactctgctgattgaaaactcctccccttctggcggctcaaaaagaaccgccgacggcagcgaattcgagtctcccaagaagaagaggaaagtcggctctggccctgccgctaagagagtgaagctggactgacactcctccatggtgatataaagaccacccacttccttcgggtgagcccctaagccatggttgtactgcactatcatcctaagacggtccttcttcggatcgcaatctcaccctggtgccgcgcttccttcgggaactgcacccgcggaccagggccgtctttgaacttttctaactgttcttacaaaaaaaaaaaaaaacaaaaaaaaaaaaaaaaaaaaaaaaaaaccaaaaaaaaaaaaaaaaaaaaaaaaaaaaaaaaaaaccccaaaaaaaaaaaaaaaaaaaaaaaaaaaaaaaaaaaaaaaaaaaaaa

SEQ ID NO: 238 - RNA, 6758 nt, synthetic construct
  source 1..6758: mol_type = other RNA
aggaaataagagagaaaagaagagtaagaagaaatataagagccaccatgaaacggacagccgacggaagcgagttcgagtcaccaaagaagaagcggaaagtcgacaagaagtacagcatcggcctggacatcggcaccaactctgtgggctgggccgtgatcaccgacgagtacaaggtgcccagcaagaaattcaaggtgctgggcaacaccgaccggcacagcatcaagaagaacctgatcggagccctgctgttcgacagcggcgaaacagccgaggccacccggctgaagagaaccgccagaagaagatacaccagacggaagaaccggatctgctatctgcaagagatcttcagcaacgagatggccaaggtggacgacagcttcttccacagactggaagagtccttcctggtggaagaggataagaagcacgagcggcaccccatcttcggcaacatcgtggacgaggtggcctaccacgagaagtaccccaccatctaccacctgagaaagaaactggtggacagcaccgacaaggccgacctgcggctgatctatctggccctggcccacatgatcaagttccggggccacttcctgatcgagggcgacctgaaccccgacaacagcgacgtggacaagctgttcatccagctggtgcagacctacaaccagctgttcgaggaaaaccccatcaacgccagcggcgtggacgccaaggccatcctgtctgccagactgagcaagagcagaaagctggaaaatctgatcgcccagctgcccggcgagaagaagaatggcctgttcggaaacctgattgccctgagcctgggcctgacccccaacttcaagagcaacttcgacctggccgaggatgccaaactgcagctgagcaaggacacctacgacgacgacctggacaacctgctggcccagatcggcgaccagtacgccgacctgtttctggccgccaagaacctgtccgacgccatcctgctgagcgacatcctgagagtgaacaccgagatcaccaaggcccccctgagcgcctctatgatcaagagatacgacgagcaccaccaggacctgaccctgctgaaagctctcgtgcggcagcagctgcctgagaagtacaaagagattttcttcgaccagagcaagaacggctacgccggctacattgacggcggagccagccaggaagagttctacaagttcatcaagcccatcctggaaaagatggacggcaccgaggaactgctcgtgaagctgaagagagaggacctgctgcggaagcagcggaccttcgacaacggcagcatcccccaccagatccacctgggagagctgcacgccattctgcggcggcaggaagatttttacccattcctgaaggacaaccgggaaaagatcgagaagatcctgaccttccgcatcccctactacgtgggccctctggccaggggaaacagcagattcgcctggatgaccagaaagagcgaggaaaccatcaccccctggaacttcgaggaagtggtggacaagggcgcttccgcccagagcttcatcgagcggatgaccaacttcgataagaacctgcccaacgagaaggtgctgcccaagcacagcctgctgtacgagtacttcaccgtgtataacgagctgaccaaagtgaaatacgtgaccgagggaatgagaaagcccgccttcctgagcggcgagcagaaaaaggccatcgtggacctgctgttcaagaccaaccggaaagtgaccgtgaagcagctgaaagaggactacttcaagaaaatcgagtgcttcgactccgtggaaatctccggcgtggaagatcggttcaacgcctccctgggcacataccacgatctgctgaaaattatcaaggacaaggacttcctggacaatgaggaaaacgaggacattctggaagatatcgtgctgaccctgacactgtttgaggacagagagatgatcgaggaacggctgaaaacctatgcccacctgttcgacgacaaagtgatgaagcagctgaagcggcggagatacaccggctggggcaggctgagccggaagctgatcaacggcatccgggacaagcagtccggcaagacaatcctggatttcctgaagtccgacggcttcgccaacagaaacttcatgcagctgatccacgacgacagcctgacctttaaagaggacatccagaaagcccaggtgtccggccagggcgatagcctgcacgagcacattgccaatctggccggcagccccgccattaagaagggcatcctgcagacagtgaaggtggtggacgagctcgtgaaagtgatgggccggcacaagcccgagaacatcgtgatcgaaatggccagagagaaccagaccacccagaagggacagaagaacagccgcgagagaatgaagcggatcgaagagggcatcaaagagctgggcagccagatcctgaaagaacaccccgtggaaaacacccagctgcagaacgagaagctgtacctgtactacctgcagaatgggcgggatatgtacgtggaccaggaactggacatcaaccggctgtccgactacgatgtggacgctatcgtgcctcagagctttctgaaggacgactccatcgacaacaaggtgctgaccagaagcgacaagaaccggggcaagagcgacaacgtgccctccgaagaggtcgtgaagaagatgaagaactactggcggcagctgctgaacgccaagctgattacccagagaaagttcgacaatctgaccaaggccgagagaggcggcctgagcgaactggataaggccggcttcatcaagagacagctggtggaaacccggcagatcacaaagcacgtggcacagatcctggactcccggatgaacactaagtacgacgagaatgacaagctgatccgggaagtgaaagtgatcaccctgaagtccaagctggtgtccgatttccggaaggatttccagttttacaaagtgcgcgagatcaacaactaccaccacgcccacgacgcctacctgaacgccgtcgtgggaaccgccctgatcaaaaagtaccctaagctggaaagcgagttcgtgtacggcgactacaaggtgtacgacgtgcggaagatgatcgccaagagcgagcaggaaatcggcaaggctaccgccaagtacttcttctacagcaacatcatgaactttttcaagaccgagattaccctggccaacggcgagatccggaagcggcctctgatcgagacaaacggcgaaaccggggagatcgtgtgggataagggccgggattttgccaccgtgcggaaagtgctgagcatgccccaagtgaatatcgtgaaaaagaccgaggtgcagacaggcggcttcagcaaagagtctatcctgcccaagaggaacagcgataagctgatcgccagaaagaaggactgggaccctaagaagtacggcggcttcgacagccccaccgtggcctattctgtgctggtggtggccaaagtggaaaagggcaagtccaagaaactgaagagtgtgaaagagctgctggggatcaccatcatggaaagaagcagcttcgagaagaatcccatcgactttctggaagccaagggctacaaagaagtgaaaaaggacctgatcatcaagctgcctaagtactccctgttcgagctggaaaacggccggaagagaatgctggcctctgccggcgaactgcagaagggaaacgaactggccctgccctccaaatatgtgaacttcctgtacctggccagccactatgagaagctgaagggctcccccgaggataatgagcagaaacagctgtttgtggaacagcacaagcactacctggacgagatcatcgagcagatcagcgagttctccaagagagtgatcctggccgacgctaatctggacaaagtgctgtccgcctacaacaagcaccgggataagcccatcagagagcaggccgagaatatcatccacctgtttaccctgaccaatctgggagcccctgccgccttcaagtactttgacaccaccatcgaccggaagaggtacaccagcaccaaagaggtgctggacgccaccctgatccaccagagcatcaccggcctgtacgagacacggatcgacctgtctcagctgggaggtgactccggcggaagctctggtggcagcaagcggaccgccgacggctctgaattcgagagccctaagaagaaaagaaaggtgagcggaggctctagcggcggaagcaccctgaacattgaagacgagtatagactgcatgaaacaagcaaggaacccgacgtgtccctgggctccacctggctgtccgactttccccaggcctgggccgagacaggaggaatgggcctggccgtgcggcaggcacccctgatcatccctctgaaggccacctctacacccgtgagcatcaagcagtaccctatgtctcaggaggccagactgggcatcaagcctcacatccagaggctgctggaccagggcatcctggtgccatgccagagcccctggaacacaccactgctgcccgtgaagaagccaggcaccaatgactatagacccgtgcaggatctgagagaggtgaacaagagggtggaggatatccaccccaccgtgcccaacccttacaatctgctgtccggcctgcccccttctcaccagtggtatacagtgctggacctgaaggatgccttcttttgtctgagactgcaccctaccagccagccactgttcgcctttgagtggagggaccctgagatgggcatctctggccagctgacctggacacgcctgcctcagggcttcaagaatagcccaacactgtttaacgaggccctgcaccgcgacctggcagatttccggatccagcacccagatctgatcctgctgcagtacgtggacgatctgctgctggccgccaccagcgagctggattgccagcagggaacacgcgccctgctgcagaccctgggaaacctgggatatagggcatccgccaagaaggcccagatctgtcagaagcaggtgaagtacctgggctatctgctgaaggagggccagagatggctgacagaggccaggaaggagacagtgatgggccagccaacacccaagaccccaagacagctgagggagttcctgggcaaagcaggattttgcaggctgttcatcccaggattcgcagagatggcagcacctctgtacccactgaccaagccgggcaccctgtttaattggggccctgaccagcagaaggcctatcaggagatcaagcaggccctgctgacagcaccagccctgggcctgccagacctgaccaagcctttcgagctgtttgtggatgagaagcagggctacgccaagggcgtgctgacccagaagctgggaccatggagacggcccgtggcctatctgtccaagaagctggacccagtggcagcaggatggccaccatgcctgaggatggtggcagcaatcgccgtgctgacaaaggatgccggcaagctgaccatgggacagccactggtcatcctggcaccacacgcagtggaggccctggtgaagcagcctccagatcgctggctgtctaacgcccggatgacacactaccaggccctgctgctggacaccgatcgcgtgcagtttggccctgtggtggccctgaatccagccaccctgctgcctctgccagaggagggcctgcagcacaactgtctggacatcctggcagaggcacacggaacaaggccagacctgaccgatcagcccctgcctgacgccgatcacacatggtataccgatggaagctccctgctgcaggagggccagaggaaggcaggagcagcagtgaccacagagacagaagtgatctgggccaaggccctgccagcaggcacatccgcccagcgggccgagctgatcgccctgacccaggccctgaagatggccgagggcaagaagctgaacgtgtacacagactccagatatgccttcgccaccgcacacatccacggagagatctacaggcgccggggctggctgacctctgagggcaaggagatcaagaacaaggatgagatcctggccctgctgaaggccctgtttctgcccaagcggctgagcatcatccactgtcctggacaccagaagggacactccgccgaggcaaggggcaatcggatggccgaccaggccgccagaaaggctgctattactgaaactcccgacacttccactctgctgattgaaaactcctccccttctggcggctcaaaaagaaccgccgacggcagcgaattcgagtctcccaagaagaagaggaaagtcggctctggccctgccgctaagagagtgaagctggactgacactcctccatggtgatataaagaccacccacttccttcgggtgagcccctaagccatggttgtactgcactatcatcctaagacggtccttcttcggatcgcaatctcaccctggtgccgcgcttccttcgggaactgcacccgcggaccagggccgtctttgaacttttctaactgttcttacaaaaaaaaaaaaaaataaaaaaaaaaaaaaaaaaaaaaaaaaattaaaaaaaaaaaaaaaaaaaaaaaaaaaaaaaaaaattttaaaaaaaaaaaaaaaaaaaaaaaaaaaaaaaaaaaaaaaaaaaaaa

SEQ ID NO: 239 - RNA, 6778 nt, synthetic construct
  source 1..6778: mol_type = other RNA
aggaaataagagagaaaagaagagtaagaagaaatataagagccaccatgaaacggacagccgacggaagcgagttcgagtcaccaaagaagaagcggaaagtcgacaagaagtacagcatcggcctggacatcggcaccaactctgtgggctgggccgtgatcaccgacgagtacaaggtgcccagcaagaaattcaaggtgctgggcaacaccgaccggcacagcatcaagaagaacctgatcggagccctgctgttcgacagcggcgaaacagccgaggccacccggctgaagagaaccgccagaagaagatacaccagacggaagaaccggatctgctatctgcaagagatcttcagcaacgagatggccaaggtggacgacagcttcttccacagactggaagagtccttcctggtggaagaggataagaagcacgagcggcaccccatcttcggcaacatcgtggacgaggtggcctaccacgagaagtaccccaccatctaccacctgagaaagaaactggtggacagcaccgacaaggccgacctgcggctgatctatctggccctggcccacatgatcaagttccggggccacttcctgatcgagggcgacctgaaccccgacaacagcgacgtggacaagctgttcatccagctggtgcagacctacaaccagctgttcgaggaaaaccccatcaacgccagcggcgtggacgccaaggccatcctgtctgccagactgagcaagagcagaaagctggaaaatctgatcgcccagctgcccggcgagaagaagaatggcctgttcggaaacctgattgccctgagcctgggcctgacccccaacttcaagagcaacttcgacctggccgaggatgccaaactgcagctgagcaaggacacctacgacgacgacctggacaacctgctggcccagatcggcgaccagtacgccgacctgtttctggccgccaagaacctgtccgacgccatcctgctgagcgacatcctgagagtgaacaccgagatcaccaaggcccccctgagcgcctctatgatcaagagatacgacgagcaccaccaggacctgaccctgctgaaagctctcgtgcggcagcagctgcctgagaagtacaaagagattttcttcgaccagagcaagaacggctacgccggctacattgacggcggagccagccaggaagagttctacaagttcatcaagcccatcctggaaaagatggacggcaccgaggaactgctcgtgaagctgaagagagaggacctgctgcggaagcagcggaccttcgacaacggcagcatcccccaccagatccacctgggagagctgcacgccattctgcggcggcaggaagatttttacccattcctgaaggacaaccgggaaaagatcgagaagatcctgaccttccgcatcccctactacgtgggccctctggccaggggaaacagcagattcgcctggatgaccagaaagagcgaggaaaccatcaccccctggaacttcgaggaagtggtggacaagggcgcttccgcccagagcttcatcgagcggatgaccaacttcgataagaacctgcccaacgagaaggtgctgcccaagcacagcctgctgtacgagtacttcaccgtgtataacgagctgaccaaagtgaaatacgtgaccgagggaatgagaaagcccgccttcctgagcggcgagcagaaaaaggccatcgtggacctgctgttcaagaccaaccggaaagtgaccgtgaagcagctgaaagaggactacttcaagaaaatcgagtgcttcgactccgtggaaatctccggcgtggaagatcggttcaacgcctccctgggcacataccacgatctgctgaaaattatcaaggacaaggacttcctggacaatgaggaaaacgaggacattctggaagatatcgtgctgaccctgacactgtttgaggacagagagatgatcgaggaacggctgaaaacctatgcccacctgttcgacgacaaagtgatgaagcagctgaagcggcggagatacaccggctggggcaggctgagccggaagctgatcaacggcatccgggacaagcagtccggcaagacaatcctggatttcctgaagtccgacggcttcgccaacagaaacttcatgcagctgatccacgacgacagcctgacctttaaagaggacatccagaaagcccaggtgtccggccagggcgatagcctgcacgagcacattgccaatctggccggcagccccgccattaagaagggcatcctgcagacagtgaaggtggtggacgagctcgtgaaagtgatgggccggcacaagcccgagaacatcgtgatcgaaatggccagagagaaccagaccacccagaagggacagaagaacagccgcgagagaatgaagcggatcgaagagggcatcaaagagctgggcagccagatcctgaaagaacaccccgtggaaaacacccagctgcagaacgagaagctgtacctgtactacctgcagaatgggcgggatatgtacgtggaccaggaactggacatcaaccggctgtccgactacgatgtggacgctatcgtgcctcagagctttctgaaggacgactccatcgacaacaaggtgctgaccagaagcgacaagaaccggggcaagagcgacaacgtgccctccgaagaggtcgtgaagaagatgaagaactactggcggcagctgctgaacgccaagctgattacccagagaaagttcgacaatctgaccaaggccgagagaggcggcctgagcgaactggataaggccggcttcatcaagagacagctggtggaaacccggcagatcacaaagcacgtggcacagatcctggactcccggatgaacactaagtacgacgagaatgacaagctgatccgggaagtgaaagtgatcaccctgaagtccaagctggtgtccgatttccggaaggatttccagttttacaaagtgcgcgagatcaacaactaccaccacgcccacgacgcctacctgaacgccgtcgtgggaaccgccctgatcaaaaagtaccctaagctggaaagcgagttcgtgtacggcgactacaaggtgtacgacgtgcggaagatgatcgccaagagcgagcaggaaatcggcaaggctaccgccaagtacttcttctacagcaacatcatgaactttttcaagaccgagattaccctggccaacggcgagatccggaagcggcctctgatcgagacaaacggcgaaaccggggagatcgtgtgggataagggccgggattttgccaccgtgcggaaagtgctgagcatgccccaagtgaatatcgtgaaaaagaccgaggtgcagacaggcggcttcagcaaagagtctatcctgcccaagaggaacagcgataagctgatcgccagaaagaaggactgggaccctaagaagtacggcggcttcgacagccccaccgtggcctattctgtgctggtggtggccaaagtggaaaagggcaagtccaagaaactgaagagtgtgaaagagctgctggggatcaccatcatggaaagaagcagcttcgagaagaatcccatcgactttctggaagccaagggctacaaagaagtgaaaaaggacctgatcatcaagctgcctaagtactccctgttcgagctggaaaacggccggaagagaatgctggcctctgccggcgaactgcagaagggaaacgaactggccctgccctccaaatatgtgaacttcctgtacctggccagccactatgagaagctgaagggctcccccgaggataatgagcagaaacagctgtttgtggaacagcacaagcactacctggacgagatcatcgagcagatcagcgagttctccaagagagtgatcctggccgacgctaatctggacaaagtgctgtccgcctacaacaagcaccgggataagcccatcagagagcaggccgagaatatcatccacctgtttaccctgaccaatctgggagcccctgccgccttcaagtactttgacaccaccatcgaccggaagaggtacaccagcaccaaagaggtgctggacgccaccctgatccaccagagcatcaccggcctgtacgagacacggatcgacctgtctcagctgggaggtgactccggcggaagctctggtggcagcaagcggaccgccgacggctctgaattcgagagccctaagaagaaaagaaaggtgagcggaggctctagcggcggaagcaccctgaacattgaagacgagtatagactgcatgaaacaagcaaggaacccgacgtgtccctgggctccacctggctgtccgactttccccaggcctgggccgagacaggaggaatgggcctggccgtgcggcaggcacccctgatcatccctctgaaggccacctctacacccgtgagcatcaagcagtaccctatgtctcaggaggccagactgggcatcaagcctcacatccagaggctgctggaccagggcatcctggtgccatgccagagcccctggaacacaccactgctgcccgtgaagaagccaggcaccaatgactatagacccgtgcaggatctgagagaggtgaacaagagggtggaggatatccaccccaccgtgcccaacccttacaatctgctgtccggcctgcccccttctcaccagtggtatacagtgctggacctgaaggatgccttcttttgtctgagactgcaccctaccagccagccactgttcgcctttgagtggagggaccctgagatgggcatctctggccagctgacctggacacgcctgcctcagggcttcaagaatagcccaacactgtttaacgaggccctgcaccgcgacctggcagatttccggatccagcacccagatctgatcctgctgcagtacgtggacgatctgctgctggccgccaccagcgagctggattgccagcagggaacacgcgccctgctgcagaccctgggaaacctgggatatagggcatccgccaagaaggcccagatctgtcagaagcaggtgaagtacctgggctatctgctgaaggagggccagagatggctgacagaggccaggaaggagacagtgatgggccagccaacacccaagaccccaagacagctgagggagttcctgggcaaagcaggattttgcaggctgttcatcccaggattcgcagagatggcagcacctctgtacccactgaccaagccgggcaccctgtttaattggggccctgaccagcagaaggcctatcaggagatcaagcaggccctgctgacagcaccagccctgggcctgccagacctgaccaagcctttcgagctgtttgtggatgagaagcagggctacgccaagggcgtgctgacccagaagctgggaccatggagacggcccgtggcctatctgtccaagaagctggacccagtggcagcaggatggccaccatgcctgaggatggtggcagcaatcgccgtgctgacaaaggatgccggcaagctgaccatgggacagccactggtcatcctggcaccacacgcagtggaggccctggtgaagcagcctccagatcgctggctgtctaacgcccggatgacacactaccaggccctgctgctggacaccgatcgcgtgcagtttggccctgtggtggccctgaatccagccaccctgctgcctctgccagaggagggcctgcagcacaactgtctggacatcctggcagaggcacacggaacaaggccagacctgaccgatcagcccctgcctgacgccgatcacacatggtataccgatggaagctccctgctgcaggagggccagaggaaggcaggagcagcagtgaccacagagacagaagtgatctgggccaaggccctgccagcaggcacatccgcccagcgggccgagctgatcgccctgacccaggccctgaagatggccgagggcaagaagctgaacgtgtacacagactccagatatgccttcgccaccgcacacatccacggagagatctacaggcgccggggctggctgacctctgagggcaaggagatcaagaacaaggatgagatcctggccctgctgaaggccctgtttctgcccaagcggctgagcatcatccactgtcctggacaccagaagggacactccgccgaggcaaggggcaatcggatggccgaccaggccgccagaaaggctgctattactgaaactcccgacacttccactctgctgattgaaaactcctccccttctggcggctcaaaaagaaccgccgacggcagcgaattcgagtctcccaagaagaagaggaaagtcggctctggccctgccgctaagagagtgaagctggactgagctggagcctcggtggccatgcttcttgccccttgggcctccccccagcccctcctccccttcctgcacccgtacccccgtggtctttgaataaagtctgagtgggcggcgtcatgaaggtttttcttttcctgagaaaacaagaaattgttttctcaggttttgctttttgaaaaaaaagcaaaagatgctggtggttggcactcctggtttccaaaaaaaaaaaaaaaaaaaaaaaaaaaaaaaaaaaaaaaaaaaaaaaaaaaaaaaaaaaaaaaaaaaaaaaaaaaaaaaaaaaaaaaaaaaaaaaaaaaaaaaaaaaaaaaaaaaaaaaa

SEQ ID NO: 240 - RNA, 6788 nt, synthetic construct
  source 1..6788: mol_type = other RNA
aggaaataagagagaaaagaagagtaagaagaaatataagagccaccatgaaacggacagccgacggaagcgagttcgagtcaccaaagaagaagcggaaagtcgacaagaagtacagcatcggcctggacatcggcaccaactctgtgggctgggccgtgatcaccgacgagtacaaggtgcccagcaagaaattcaaggtgctgggcaacaccgaccggcacagcatcaagaagaacctgatcggagccctgctgttcgacagcggcgaaacagccgaggccacccggctgaagagaaccgccagaagaagatacaccagacggaagaaccggatctgctatctgcaagagatcttcagcaacgagatggccaaggtggacgacagcttcttccacagactggaagagtccttcctggtggaagaggataagaagcacgagcggcaccccatcttcggcaacatcgtggacgaggtggcctaccacgagaagtaccccaccatctaccacctgagaaagaaactggtggacagcaccgacaaggccgacctgcggctgatctatctggccctggcccacatgatcaagttccggggccacttcctgatcgagggcgacctgaaccccgacaacagcgacgtggacaagctgttcatccagctggtgcagacctacaaccagctgttcgaggaaaaccccatcaacgccagcggcgtggacgccaaggccatcctgtctgccagactgagcaagagcagaaagctggaaaatctgatcgcccagctgcccggcgagaagaagaatggcctgttcggaaacctgattgccctgagcctgggcctgacccccaacttcaagagcaacttcgacctggccgaggatgccaaactgcagctgagcaaggacacctacgacgacgacctggacaacctgctggcccagatcggcgaccagtacgccgacctgtttctggccgccaagaacctgtccgacgccatcctgctgagcgacatcctgagagtgaacaccgagatcaccaaggcccccctgagcgcctctatgatcaagagatacgacgagcaccaccaggacctgaccctgctgaaagctctcgtgcggcagcagctgcctgagaagtacaaagagattttcttcgaccagagcaagaacggctacgccggctacattgacggcggagccagccaggaagagttctacaagttcatcaagcccatcctggaaaagatggacggcaccgaggaactgctcgtgaagctgaagagagaggacctgctgcggaagcagcggaccttcgacaacggcagcatcccccaccagatccacctgggagagctgcacgccattctgcggcggcaggaagatttttacccattcctgaaggacaaccgggaaaagatcgagaagatcctgaccttccgcatcccctactacgtgggccctctggccaggggaaacagcagattcgcctggatgaccagaaagagcgaggaaaccatcaccccctggaacttcgaggaagtggtggacaagggcgcttccgcccagagcttcatcgagcggatgaccaacttcgataagaacctgcccaacgagaaggtgctgcccaagcacagcctgctgtacgagtacttcaccgtgtataacgagctgaccaaagtgaaatacgtgaccgagggaatgagaaagcccgccttcctgagcggcgagcagaaaaaggccatcgtggacctgctgttcaagaccaaccggaaagtgaccgtgaagcagctgaaagaggactacttcaagaaaatcgagtgcttcgactccgtggaaatctccggcgtggaagatcggttcaacgcctccctgggcacataccacgatctgctgaaaattatcaaggacaaggacttcctggacaatgaggaaaacgaggacattctggaagatatcgtgctgaccctgacactgtttgaggacagagagatgatcgaggaacggctgaaaacctatgcccacctgttcgacgacaaagtgatgaagcagctgaagcggcggagatacaccggctggggcaggctgagccggaagctgatcaacggcatccgggacaagcagtccggcaagacaatcctggatttcctgaagtccgacggcttcgccaacagaaacttcatgcagctgatccacgacgacagcctgacctttaaagaggacatccagaaagcccaggtgtccggccagggcgatagcctgcacgagcacattgccaatctggccggcagccccgccattaagaagggcatcctgcagacagtgaaggtggtggacgagctcgtgaaagtgatgggccggcacaagcccgagaacatcgtgatcgaaatggccagagagaaccagaccacccagaagggacagaagaacagccgcgagagaatgaagcggatcgaagagggcatcaaagagctgggcagccagatcctgaaagaacaccccgtggaaaacacccagctgcagaacgagaagctgtacctgtactacctgcagaatgggcgggatatgtacgtggaccaggaactggacatcaaccggctgtccgactacgatgtggacgctatcgtgcctcagagctttctgaaggacgactccatcgacaacaaggtgctgaccagaagcgacaagaaccggggcaagagcgacaacgtgccctccgaagaggtcgtgaagaagatgaagaactactggcggcagctgctgaacgccaagctgattacccagagaaagttcgacaatctgaccaaggccgagagaggcggcctgagcgaactggataaggccggcttcatcaagagacagctggtggaaacccggcagatcacaaagcacgtggcacagatcctggactcccggatgaacactaagtacgacgagaatgacaagctgatccgggaagtgaaagtgatcaccctgaagtccaagctggtgtccgatttccggaaggatttccagttttacaaagtgcgcgagatcaacaactaccaccacgcccacgacgcctacctgaacgccgtcgtgggaaccgccctgatcaaaaagtaccctaagctggaaagcgagttcgtgtacggcgactacaaggtgtacgacgtgcggaagatgatcgccaagagcgagcaggaaatcggcaaggctaccgccaagtacttcttctacagcaacatcatgaactttttcaagaccgagattaccctggccaacggcgagatccggaagcggcctctgatcgagacaaacggcgaaaccggggagatcgtgtgggataagggccgggattttgccaccgtgcggaaagtgctgagcatgccccaagtgaatatcgtgaaaaagaccgaggtgcagacaggcggcttcagcaaagagtctatcctgcccaagaggaacagcgataagctgatcgccagaaagaaggactgggaccctaagaagtacggcggcttcgacagccccaccgtggcctattctgtgctggtggtggccaaagtggaaaagggcaagtccaagaaactgaagagtgtgaaagagctgctggggatcaccatcatggaaagaagcagcttcgagaagaatcccatcgactttctggaagccaagggctacaaagaagtgaaaaaggacctgatcatcaagctgcctaagtactccctgttcgagctggaaaacggccggaagagaatgctggcctctgccggcgaactgcagaagggaaacgaactggccctgccctccaaatatgtgaacttcctgtacctggccagccactatgagaagctgaagggctcccccgaggataatgagcagaaacagctgtttgtggaacagcacaagcactacctggacgagatcatcgagcagatcagcgagttctccaagagagtgatcctggccgacgctaatctggacaaagtgctgtccgcctacaacaagcaccgggataagcccatcagagagcaggccgagaatatcatccacctgtttaccctgaccaatctgggagcccctgccgccttcaagtactttgacaccaccatcgaccggaagaggtacaccagcaccaaagaggtgctggacgccaccctgatccaccagagcatcaccggcctgtacgagacacggatcgacctgtctcagctgggaggtgactccggcggaagctctggtggcagcaagcggaccgccgacggctctgaattcgagagccctaagaagaaaagaaaggtgagcggaggctctagcggcggaagcaccctgaacattgaagacgagtatagactgcatgaaacaagcaaggaacccgacgtgtccctgggctccacctggctgtccgactttccccaggcctgggccgagacaggaggaatgggcctggccgtgcggcaggcacccctgatcatccctctgaaggccacctctacacccgtgagcatcaagcagtaccctatgtctcaggaggccagactgggcatcaagcctcacatccagaggctgctggaccagggcatcctggtgccatgccagagcccctggaacacaccactgctgcccgtgaagaagccaggcaccaatgactatagacccgtgcaggatctgagagaggtgaacaagagggtggaggatatccaccccaccgtgcccaacccttacaatctgctgtccggcctgcccccttctcaccagtggtatacagtgctggacctgaaggatgccttcttttgtctgagactgcaccctaccagccagccactgttcgcctttgagtggagggaccctgagatgggcatctctggccagctgacctggacacgcctgcctcagggcttcaagaatagcccaacactgtttaacgaggccctgcaccgcgacctggcagatttccggatccagcacccagatctgatcctgctgcagtacgtggacgatctgctgctggccgccaccagcgagctggattgccagcagggaacacgcgccctgctgcagaccctgggaaacctgggatatagggcatccgccaagaaggcccagatctgtcagaagcaggtgaagtacctgggctatctgctgaaggagggccagagatggctgacagaggccaggaaggagacagtgatgggccagccaacacccaagaccccaagacagctgagggagttcctgggcaaagcaggattttgcaggctgttcatcccaggattcgcagagatggcagcacctctgtacccactgaccaagccgggcaccctgtttaattggggccctgaccagcagaaggcctatcaggagatcaagcaggccctgctgacagcaccagccctgggcctgccagacctgaccaagcctttcgagctgtttgtggatgagaagcagggctacgccaagggcgtgctgacccagaagctgggaccatggagacggcccgtggcctatctgtccaagaagctggacccagtggcagcaggatggccaccatgcctgaggatggtggcagcaatcgccgtgctgacaaaggatgccggcaagctgaccatgggacagccactggtcatcctggcaccacacgcagtggaggccctggtgaagcagcctccagatcgctggctgtctaacgcccggatgacacactaccaggccctgctgctggacaccgatcgcgtgcagtttggccctgtggtggccctgaatccagccaccctgctgcctctgccagaggagggcctgcagcacaactgtctggacatcctggcagaggcacacggaacaaggccagacctgaccgatcagcccctgcctgacgccgatcacacatggtataccgatggaagctccctgctgcaggagggccagaggaaggcaggagcagcagtgaccacagagacagaagtgatctgggccaaggccctgccagcaggcacatccgcccagcgggccgagctgatcgccctgacccaggccctgaagatggccgagggcaagaagctgaacgtgtacacagactccagatatgccttcgccaccgcacacatccacggagagatctacaggcgccggggctggctgacctctgagggcaaggagatcaagaacaaggatgagatcctggccctgctgaaggccctgtttctgcccaagcggctgagcatcatccactgtcctggacaccagaagggacactccgccgaggcaaggggcaatcggatggccgaccaggccgccagaaaggctgctattactgaaactcccgacacttccactctgctgattgaaaactcctccccttctggcggctcaaaaagaaccgccgacggcagcgaattcgagtctcccaagaagaagaggaaagtcggctctggccctgccgctaagagagtgaagctggactgagctggagcctcggtggccatgcttcttgccccttgggcctccccccagcccctcctccccttcctgcacccgtacccccgtggtctttgaataaagtctgagtgggcggcgtcatgaaggtttttcttttcctgagaaaacaagaaattgttttctcaggttttgctttttgaaaaaaaagcaaaagatgctggtggttggcactcctggtttccaaaaaaaaaaaaaaaaaaaaaaaaaaaaaaaaaaaaaaaaaaaaaaaaaaaaaaaaaaaaaaaaaaaaaaaaaaaaaaaaaaaaaaaaaaaaaaaaaaaaaaaaaaaaaaaaaaaaaaaaaaaaaaaaaa

SEQ ID NO: 241 - RNA, 6778 nt, synthetic construct
  source 1..6778: mol_type = other RNA
aggaaataagagagaaaagaagagtaagaagaaatataagagccaccatgaaacggacagccgacggaagcgagttcgagtcaccaaagaagaagcggaaagtcgacaagaagtacagcatcggcctggacatcggcaccaactctgtgggctgggccgtgatcaccgacgagtacaaggtgcccagcaagaaattcaaggtgctgggcaacaccgaccggcacagcatcaagaagaacctgatcggagccctgctgttcgacagcggcgaaacagccgaggccacccggctgaagagaaccgccagaagaagatacaccagacggaagaaccggatctgctatctgcaagagatcttcagcaacgagatggccaaggtggacgacagcttcttccacagactggaagagtccttcctggtggaagaggataagaagcacgagcggcaccccatcttcggcaacatcgtggacgaggtggcctaccacgagaagtaccccaccatctaccacctgagaaagaaactggtggacagcaccgacaaggccgacctgcggctgatctatctggccctggcccacatgatcaagttccggggccacttcctgatcgagggcgacctgaaccccgacaacagcgacgtggacaagctgttcatccagctggtgcagacctacaaccagctgttcgaggaaaaccccatcaacgccagcggcgtggacgccaaggccatcctgtctgccagactgagcaagagcagaaagctggaaaatctgatcgcccagctgcccggcgagaagaagaatggcctgttcggaaacctgattgccctgagcctgggcctgacccccaacttcaagagcaacttcgacctggccgaggatgccaaactgcagctgagcaaggacacctacgacgacgacctggacaacctgctggcccagatcggcgaccagtacgccgacctgtttctggccgccaagaacctgtccgacgccatcctgctgagcgacatcctgagagtgaacaccgagatcaccaaggcccccctgagcgcctctatgatcaagagatacgacgagcaccaccaggacctgaccctgctgaaagctctcgtgcggcagcagctgcctgagaagtacaaagagattttcttcgaccagagcaagaacggctacgccggctacattgacggcggagccagccaggaagagttctacaagttcatcaagcccatcctggaaaagatggacggcaccgaggaactgctcgtgaagctgaagagagaggacctgctgcggaagcagcggaccttcgacaacggcagcatcccccaccagatccacctgggagagctgcacgccattctgcggcggcaggaagatttttacccattcctgaaggacaaccgggaaaagatcgagaagatcctgaccttccgcatcccctactacgtgggccctctggccaggggaaacagcagattcgcctggatgaccagaaagagcgaggaaaccatcaccccctggaacttcgaggaagtggtggacaagggcgcttccgcccagagcttcatcgagcggatgaccaacttcgataagaacctgcccaacgagaaggtgctgcccaagcacagcctgctgtacgagtacttcaccgtgtataacgagctgaccaaagtgaaatacgtgaccgagggaatgagaaagcccgccttcctgagcggcgagcagaaaaaggccatcgtggacctgctgttcaagaccaaccggaaagtgaccgtgaagcagctgaaagaggactacttcaagaaaatcgagtgcttcgactccgtggaaatctccggcgtggaagatcggttcaacgcctccctgggcacataccacgatctgctgaaaattatcaaggacaaggacttcctggacaatgaggaaaacgaggacattctggaagatatcgtgctgaccctgacactgtttgaggacagagagatgatcgaggaacggctgaaaacctatgcccacctgttcgacgacaaagtgatgaagcagctgaagcggcggagatacaccggctggggcaggctgagccggaagctgatcaacggcatccgggacaagcagtccggcaagacaatcctggatttcctgaagtccgacggcttcgccaacagaaacttcatgcagctgatccacgacgacagcctgacctttaaagaggacatccagaaagcccaggtgtccggccagggcgatagcctgcacgagcacattgccaatctggccggcagccccgccattaagaagggcatcctgcagacagtgaaggtggtggacgagctcgtgaaagtgatgggccggcacaagcccgagaacatcgtgatcgaaatggccagagagaaccagaccacccagaagggacagaagaacagccgcgagagaatgaagcggatcgaagagggcatcaaagagctgggcagccagatcctgaaagaacaccccgtggaaaacacccagctgcagaacgagaagctgtacctgtactacctgcagaatgggcgggatatgtacgtggaccaggaactggacatcaaccggctgtccgactacgatgtggacgctatcgtgcctcagagctttctgaaggacgactccatcgacaacaaggtgctgaccagaagcgacaagaaccggggcaagagcgacaacgtgccctccgaagaggtcgtgaagaagatgaagaactactggcggcagctgctgaacgccaagctgattacccagagaaagttcgacaatctgaccaaggccgagagaggcggcctgagcgaactggataaggccggcttcatcaagagacagctggtggaaacccggcagatcacaaagcacgtggcacagatcctggactcccggatgaacactaagtacgacgagaatgacaagctgatccgggaagtgaaagtgatcaccctgaagtccaagctggtgtccgatttccggaaggatttccagttttacaaagtgcgcgagatcaacaactaccaccacgcccacgacgcctacctgaacgccgtcgtgggaaccgccctgatcaaaaagtaccctaagctggaaagcgagttcgtgtacggcgactacaaggtgtacgacgtgcggaagatgatcgccaagagcgagcaggaaatcggcaaggctaccgccaagtacttcttctacagcaacatcatgaactttttcaagaccgagattaccctggccaacggcgagatccggaagcggcctctgatcgagacaaacggcgaaaccggggagatcgtgtgggataagggccgggattttgccaccgtgcggaaagtgctgagcatgccccaagtgaatatcgtgaaaaagaccgaggtgcagacaggcggcttcagcaaagagtctatcctgcccaagaggaacagcgataagctgatcgccagaaagaaggactgggaccctaagaagtacggcggcttcgacagccccaccgtggcctattctgtgctggtggtggccaaagtggaaaagggcaagtccaagaaactgaagagtgtgaaagagctgctggggatcaccatcatggaaagaagcagcttcgagaagaatcccatcgactttctggaagccaagggctacaaagaagtgaaaaaggacctgatcatcaagctgcctaagtactccctgttcgagctggaaaacggccggaagagaatgctggcctctgccggcgaactgcagaagggaaacgaactggccctgccctccaaatatgtgaacttcctgtacctggccagccactatgagaagctgaagggctcccccgaggataatgagcagaaacagctgtttgtggaacagcacaagcactacctggacgagatcatcgagcagatcagcgagttctccaagagagtgatcctggccgacgctaatctggacaaagtgctgtccgcctacaacaagcaccgggataagcccatcagagagcaggccgagaatatcatccacctgtttaccctgaccaatctgggagcccctgccgccttcaagtactttgacaccaccatcgaccggaagaggtacaccagcaccaaagaggtgctggacgccaccctgatccaccagagcatcaccggcctgtacgagacacggatcgacctgtctcagctgggaggtgactccggcggaagctctggtggcagcaagcggaccgccgacggctctgaattcgagagccctaagaagaaaagaaaggtgagcggaggctctagcggcggaagcaccctgaacattgaagacgagtatagactgcatgaaacaagcaaggaacccgacgtgtccctgggctccacctggctgtccgactttccccaggcctgggccgagacaggaggaatgggcctggccgtgcggcaggcacccctgatcatccctctgaaggccacctctacacccgtgagcatcaagcagtaccctatgtctcaggaggccagactgggcatcaagcctcacatccagaggctgctggaccagggcatcctggtgccatgccagagcccctggaacacaccactgctgcccgtgaagaagccaggcaccaatgactatagacccgtgcaggatctgagagaggtgaacaagagggtggaggatatccaccccaccgtgcccaacccttacaatctgctgtccggcctgcccccttctcaccagtggtatacagtgctggacctgaaggatgccttcttttgtctgagactgcaccctaccagccagccactgttcgcctttgagtggagggaccctgagatgggcatctctggccagctgacctggacacgcctgcctcagggcttcaagaatagcccaacactgtttaacgaggccctgcaccgcgacctggcagatttccggatccagcacccagatctgatcctgctgcagtacgtggacgatctgctgctggccgccaccagcgagctggattgccagcagggaacacgcgccctgctgcagaccctgggaaacctgggatatagggcatccgccaagaaggcccagatctgtcagaagcaggtgaagtacctgggctatctgctgaaggagggccagagatggctgacagaggccaggaaggagacagtgatgggccagccaacacccaagaccccaagacagctgagggagttcctgggcaaagcaggattttgcaggctgttcatcccaggattcgcagagatggcagcacctctgtacccactgaccaagccgggcaccctgtttaattggggccctgaccagcagaaggcctatcaggagatcaagcaggccctgctgacagcaccagccctgggcctgccagacctgaccaagcctttcgagctgtttgtggatgagaagcagggctacgccaagggcgtgctgacccagaagctgggaccatggagacggcccgtggcctatctgtccaagaagctggacccagtggcagcaggatggccaccatgcctgaggatggtggcagcaatcgccgtgctgacaaaggatgccggcaagctgaccatgggacagccactggtcatcctggcaccacacgcagtggaggccctggtgaagcagcctccagatcgctggctgtctaacgcccggatgacacactaccaggccctgctgctggacaccgatcgcgtgcagtttggccctgtggtggccctgaatccagccaccctgctgcctctgccagaggagggcctgcagcacaactgtctggacatcctggcagaggcacacggaacaaggccagacctgaccgatcagcccctgcctgacgccgatcacacatggtataccgatggaagctccctgctgcaggagggccagaggaaggcaggagcagcagtgaccacagagacagaagtgatctgggccaaggccctgccagcaggcacatccgcccagcgggccgagctgatcgccctgacccaggccctgaagatggccgagggcaagaagctgaacgtgtacacagactccagatatgccttcgccaccgcacacatccacggagagatctacaggcgccggggctggctgacctctgagggcaaggagatcaagaacaaggatgagatcctggccctgctgaaggccctgtttctgcccaagcggctgagcatcatccactgtcctggacaccagaagggacactccgccgaggcaaggggcaatcggatggccgaccaggccgccagaaaggctgctattactgaaactcccgacacttccactctgctgattgaaaactcctccccttctggcggctcaaaaagaaccgccgacggcagcgaattcgagtctcccaagaagaagaggaaagtcggctctggccctgccgctaagagagtgaagctggactgagctggagcctcggtggccatgcttcttgccccttgggcctccccccagcccctcctccccttcctgcacccgtacccccgtggtctttgaataaagtctgagtgggcggcgtcatgaaggtttttcttttcctgagaaaacaagaaattgttttctcaggttttgctttttgaaaaaaaagcaaaagatgctggtggttggcactcctggtttccaaaaaaaaaaaaaaaaaaaaaaaaaaaaaagcatatgactaaaaaaaaaaaaaaaaaaaaaaaaaaaaaaaaaaaaaaaaaaaaaaaaaaaaaaaaaaaaaaaaaaaaaaaaaaaaaaaa

SEQ ID NO: 242 - RNA, 6788 nt, synthetic construct
  source 1..6788: mol_type = other RNA
aggaaataagagagaaaagaagagtaagaagaaatataagagccaccatgaaacggacagccgacggaagcgagttcgagtcaccaaagaagaagcggaaagtcgacaagaagtacagcatcggcctggacatcggcaccaactctgtgggctgggccgtgatcaccgacgagtacaaggtgcccagcaagaaattcaaggtgctgggcaacaccgaccggcacagcatcaagaagaacctgatcggagccctgctgttcgacagcggcgaaacagccgaggccacccggctgaagagaaccgccagaagaagatacaccagacggaagaaccggatctgctatctgcaagagatcttcagcaacgagatggccaaggtggacgacagcttcttccacagactggaagagtccttcctggtggaagaggataagaagcacgagcggcaccccatcttcggcaacatcgtggacgaggtggcctaccacgagaagtaccccaccatctaccacctgagaaagaaactggtggacagcaccgacaaggccgacctgcggctgatctatctggccctggcccacatgatcaagttccggggccacttcctgatcgagggcgacctgaaccccgacaacagcgacgtggacaagctgttcatccagctggtgcagacctacaaccagctgttcgaggaaaaccccatcaacgccagcggcgtggacgccaaggccatcctgtctgccagactgagcaagagcagaaagctggaaaatctgatcgcccagctgcccggcgagaagaagaatggcctgttcggaaacctgattgccctgagcctgggcctgacccccaacttcaagagcaacttcgacctggccgaggatgccaaactgcagctgagcaaggacacctacgacgacgacctggacaacctgctggcccagatcggcgaccagtacgccgacctgtttctggccgccaagaacctgtccgacgccatcctgctgagcgacatcctgagagtgaacaccgagatcaccaaggcccccctgagcgcctctatgatcaagagatacgacgagcaccaccaggacctgaccctgctgaaagctctcgtgcggcagcagctgcctgagaagtacaaagagattttcttcgaccagagcaagaacggctacgccggctacattgacggcggagccagccaggaagagttctacaagttcatcaagcccatcctggaaaagatggacggcaccgaggaactgctcgtgaagctgaagagagaggacctgctgcggaagcagcggaccttcgacaacggcagcatcccccaccagatccacctgggagagctgcacgccattctgcggcggcaggaagatttttacccattcctgaaggacaaccgggaaaagatcgagaagatcctgaccttccgcatcccctactacgtgggccctctggccaggggaaacagcagattcgcctggatgaccagaaagagcgaggaaaccatcaccccctggaacttcgaggaagtggtggacaagggcgcttccgcccagagcttcatcgagcggatgaccaacttcgataagaacctgcccaacgagaaggtgctgcccaagcacagcctgctgtacgagtacttcaccgtgtataacgagctgaccaaagtgaaatacgtgaccgagggaatgagaaagcccgccttcctgagcggcgagcagaaaaaggccatcgtggacctgctgttcaagaccaaccggaaagtgaccgtgaagcagctgaaagaggactacttcaagaaaatcgagtgcttcgactccgtggaaatctccggcgtggaagatcggttcaacgcctccctgggcacataccacgatctgctgaaaattatcaaggacaaggacttcctggacaatgaggaaaacgaggacattctggaagatatcgtgctgaccctgacactgtttgaggacagagagatgatcgaggaacggctgaaaacctatgcccacctgttcgacgacaaagtgatgaagcagctgaagcggcggagatacaccggctggggcaggctgagccggaagctgatcaacggcatccgggacaagcagtccggcaagacaatcctggatttcctgaagtccgacggcttcgccaacagaaacttcatgcagctgatccacgacgacagcctgacctttaaagaggacatccagaaagcccaggtgtccggccagggcgatagcctgcacgagcacattgccaatctggccggcagccccgccattaagaagggcatcctgcagacagtgaaggtggtggacgagctcgtgaaagtgatgggccggcacaagcccgagaacatcgtgatcgaaatggccagagagaaccagaccacccagaagggacagaagaacagccgcgagagaatgaagcggatcgaagagggcatcaaagagctgggcagccagatcctgaaagaacaccccgtggaaaacacccagctgcagaacgagaagctgtacctgtactacctgcagaatgggcgggatatgtacgtggaccaggaactggacatcaaccggctgtccgactacgatgtggacgctatcgtgcctcagagctttctgaaggacgactccatcgacaacaaggtgctgaccagaagcgacaagaaccggggcaagagcgacaacgtgccctccgaagaggtcgtgaagaagatgaagaactactggcggcagctgctgaacgccaagctgattacccagagaaagttcgacaatctgaccaaggccgagagaggcggcctgagcgaactggataaggccggcttcatcaagagacagctggtggaaacccggcagatcacaaagcacgtggcacagatcctggactcccggatgaacactaagtacgacgagaatgacaagctgatccgggaagtgaaagtgatcaccctgaagtccaagctggtgtccgatttccggaaggatttccagttttacaaagtgcgcgagatcaacaactaccaccacgcccacgacgcctacctgaacgccgtcgtgggaaccgccctgatcaaaaagtaccctaagctggaaagcgagttcgtgtacggcgactacaaggtgtacgacgtgcggaagatgatcgccaagagcgagcaggaaatcggcaaggctaccgccaagtacttcttctacagcaacatcatgaactttttcaagaccgagattaccctggccaacggcgagatccggaagcggcctctgatcgagacaaacggcgaaaccggggagatcgtgtgggataagggccgggattttgccaccgtgcggaaagtgctgagcatgccccaagtgaatatcgtgaaaaagaccgaggtgcagacaggcggcttcagcaaagagtctatcctgcccaagaggaacagcgataagctgatcgccagaaagaaggactgggaccctaagaagtacggcggcttcgacagccccaccgtggcctattctgtgctggtggtggccaaagtggaaaagggcaagtccaagaaactgaagagtgtgaaagagctgctggggatcaccatcatggaaagaagcagcttcgagaagaatcccatcgactttctggaagccaagggctacaaagaagtgaaaaaggacctgatcatcaagctgcctaagtactccctgttcgagctggaaaacggccggaagagaatgctggcctctgccggcgaactgcagaagggaaacgaactggccctgccctccaaatatgtgaacttcctgtacctggccagccactatgagaagctgaagggctcccccgaggataatgagcagaaacagctgtttgtggaacagcacaagcactacctggacgagatcatcgagcagatcagcgagttctccaagagagtgatcctggccgacgctaatctggacaaagtgctgtccgcctacaacaagcaccgggataagcccatcagagagcaggccgagaatatcatccacctgtttaccctgaccaatctgggagcccctgccgccttcaagtactttgacaccaccatcgaccggaagaggtacaccagcaccaaagaggtgctggacgccaccctgatccaccagagcatcaccggcctgtacgagacacggatcgacctgtctcagctgggaggtgactccggcggaagctctggtggcagcaagcggaccgccgacggctctgaattcgagagccctaagaagaaaagaaaggtgagcggaggctctagcggcggaagcaccctgaacattgaagacgagtatagactgcatgaaacaagcaaggaacccgacgtgtccctgggctccacctggctgtccgactttccccaggcctgggccgagacaggaggaatgggcctggccgtgcggcaggcacccctgatcatccctctgaaggccacctctacacccgtgagcatcaagcagtaccctatgtctcaggaggccagactgggcatcaagcctcacatccagaggctgctggaccagggcatcctggtgccatgccagagcccctggaacacaccactgctgcccgtgaagaagccaggcaccaatgactatagacccgtgcaggatctgagagaggtgaacaagagggtggaggatatccaccccaccgtgcccaacccttacaatctgctgtccggcctgcccccttctcaccagtggtatacagtgctggacctgaaggatgccttcttttgtctgagactgcaccctaccagccagccactgttcgcctttgagtggagggaccctgagatgggcatctctggccagctgacctggacacgcctgcctcagggcttcaagaatagcccaacactgtttaacgaggccctgcaccgcgacctggcagatttccggatccagcacccagatctgatcctgctgcagtacgtggacgatctgctgctggccgccaccagcgagctggattgccagcagggaacacgcgccctgctgcagaccctgggaaacctgggatatagggcatccgccaagaaggcccagatctgtcagaagcaggtgaagtacctgggctatctgctgaaggagggccagagatggctgacagaggccaggaaggagacagtgatgggccagccaacacccaagaccccaagacagctgagggagttcctgggcaaagcaggattttgcaggctgttcatcccaggattcgcagagatggcagcacctctgtacccactgaccaagccgggcaccctgtttaattggggccctgaccagcagaaggcctatcaggagatcaagcaggccctgctgacagcaccagccctgggcctgccagacctgaccaagcctttcgagctgtttgtggatgagaagcagggctacgccaagggcgtgctgacccagaagctgggaccatggagacggcccgtggcctatctgtccaagaagctggacccagtggcagcaggatggccaccatgcctgaggatggtggcagcaatcgccgtgctgacaaaggatgccggcaagctgaccatgggacagccactggtcatcctggcaccacacgcagtggaggccctggtgaagcagcctccagatcgctggctgtctaacgcccggatgacacactaccaggccctgctgctggacaccgatcgcgtgcagtttggccctgtggtggccctgaatccagccaccctgctgcctctgccagaggagggcctgcagcacaactgtctggacatcctggcagaggcacacggaacaaggccagacctgaccgatcagcccctgcctgacgccgatcacacatggtataccgatggaagctccctgctgcaggagggccagaggaaggcaggagcagcagtgaccacagagacagaagtgatctgggccaaggccctgccagcaggcacatccgcccagcgggccgagctgatcgccctgacccaggccctgaagatggccgagggcaagaagctgaacgtgtacacagactccagatatgccttcgccaccgcacacatccacggagagatctacaggcgccggggctggctgacctctgagggcaaggagatcaagaacaaggatgagatcctggccctgctgaaggccctgtttctgcccaagcggctgagcatcatccactgtcctggacaccagaagggacactccgccgaggcaaggggcaatcggatggccgaccaggccgccagaaaggctgctattactgaaactcccgacacttccactctgctgattgaaaactcctccccttctggcggctcaaaaagaaccgccgacggcagcgaattcgagtctcccaagaagaagaggaaagtcggctctggccctgccgctaagagagtgaagctggactgagctggagcctcggtggccatgcttcttgccccttgggcctccccccagcccctcctccccttcctgcacccgtacccccgtggtctttgaataaagtctgagtgggcggcgtcatgaaggtttttcttttcctgagaaaacaagaaattgttttctcaggttttgctttttgaaaaaaaagcaaaagatgctggtggttggcactcctggtttccaaaaaaaaaaaaaaaaaaaaaaaaaaaaaaaaaaaaaaaagcatatgactaaaaaaaaaaaaaaaaaaaaaaaaaaaaaagcataagactaaaaaaaaaaaaaaaaaaaaaaaaaaaaaaaaaaaaaaaa

SEQ ID NO: 243 - RNA, 6788 nt, synthetic construct
  source 1..6788: mol_type = other RNA
aggaaataagagagaaaagaagagtaagaagaaatataagagccaccatgaaacggacagccgacggaagcgagttcgagtcaccaaagaagaagcggaaagtcgacaagaagtacagcatcggcctggacatcggcaccaactctgtgggctgggccgtgatcaccgacgagtacaaggtgcccagcaagaaattcaaggtgctgggcaacaccgaccggcacagcatcaagaagaacctgatcggagccctgctgttcgacagcggcgaaacagccgaggccacccggctgaagagaaccgccagaagaagatacaccagacggaagaaccggatctgctatctgcaagagatcttcagcaacgagatggccaaggtggacgacagcttcttccacagactggaagagtccttcctggtggaagaggataagaagcacgagcggcaccccatcttcggcaacatcgtggacgaggtggcctaccacgagaagtaccccaccatctaccacctgagaaagaaactggtggacagcaccgacaaggccgacctgcggctgatctatctggccctggcccacatgatcaagttccggggccacttcctgatcgagggcgacctgaaccccgacaacagcgacgtggacaagctgttcatccagctggtgcagacctacaaccagctgttcgaggaaaaccccatcaacgccagcggcgtggacgccaaggccatcctgtctgccagactgagcaagagcagaaagctggaaaatctgatcgcccagctgcccggcgagaagaagaatggcctgttcggaaacctgattgccctgagcctgggcctgacccccaacttcaagagcaacttcgacctggccgaggatgccaaactgcagctgagcaaggacacctacgacgacgacctggacaacctgctggcccagatcggcgaccagtacgccgacctgtttctggccgccaagaacctgtccgacgccatcctgctgagcgacatcctgagagtgaacaccgagatcaccaaggcccccctgagcgcctctatgatcaagagatacgacgagcaccaccaggacctgaccctgctgaaagctctcgtgcggcagcagctgcctgagaagtacaaagagattttcttcgaccagagcaagaacggctacgccggctacattgacggcggagccagccaggaagagttctacaagttcatcaagcccatcctggaaaagatggacggcaccgaggaactgctcgtgaagctgaagagagaggacctgctgcggaagcagcggaccttcgacaacggcagcatcccccaccagatccacctgggagagctgcacgccattctgcggcggcaggaagatttttacccattcctgaaggacaaccgggaaaagatcgagaagatcctgaccttccgcatcccctactacgtgggccctctggccaggggaaacagcagattcgcctggatgaccagaaagagcgaggaaaccatcaccccctggaacttcgaggaagtggtggacaagggcgcttccgcccagagcttcatcgagcggatgaccaacttcgataagaacctgcccaacgagaaggtgctgcccaagcacagcctgctgtacgagtacttcaccgtgtataacgagctgaccaaagtgaaatacgtgaccgagggaatgagaaagcccgccttcctgagcggcgagcagaaaaaggccatcgtggacctgctgttcaagaccaaccggaaagtgaccgtgaagcagctgaaagaggactacttcaagaaaatcgagtgcttcgactccgtggaaatctccggcgtggaagatcggttcaacgcctccctgggcacataccacgatctgctgaaaattatcaaggacaaggacttcctggacaatgaggaaaacgaggacattctggaagatatcgtgctgaccctgacactgtttgaggacagagagatgatcgaggaacggctgaaaacctatgcccacctgttcgacgacaaagtgatgaagcagctgaagcggcggagatacaccggctggggcaggctgagccggaagctgatcaacggcatccgggacaagcagtccggcaagacaatcctggatttcctgaagtccgacggcttcgccaacagaaacttcatgcagctgatccacgacgacagcctgacctttaaagaggacatccagaaagcccaggtgtccggccagggcgatagcctgcacgagcacattgccaatctggccggcagccccgccattaagaagggcatcctgcagacagtgaaggtggtggacgagctcgtgaaagtgatgggccggcacaagcccgagaacatcgtgatcgaaatggccagagagaaccagaccacccagaagggacagaagaacagccgcgagagaatgaagcggatcgaagagggcatcaaagagctgggcagccagatcctgaaagaacaccccgtggaaaacacccagctgcagaacgagaagctgtacctgtactacctgcagaatgggcgggatatgtacgtggaccaggaactggacatcaaccggctgtccgactacgatgtggacgctatcgtgcctcagagctttctgaaggacgactccatcgacaacaaggtgctgaccagaagcgacaagaaccggggcaagagcgacaacgtgccctccgaagaggtcgtgaagaagatgaagaactactggcggcagctgctgaacgccaagctgattacccagagaaagttcgacaatctgaccaaggccgagagaggcggcctgagcgaactggataaggccggcttcatcaagagacagctggtggaaacccggcagatcacaaagcacgtggcacagatcctggactcccggatgaacactaagtacgacgagaatgacaagctgatccgggaagtgaaagtgatcaccctgaagtccaagctggtgtccgatttccggaaggatttccagttttacaaagtgcgcgagatcaacaactaccaccacgcccacgacgcctacctgaacgccgtcgtgggaaccgccctgatcaaaaagtaccctaagctggaaagcgagttcgtgtacggcgactacaaggtgtacgacgtgcggaagatgatcgccaagagcgagcaggaaatcggcaaggctaccgccaagtacttcttctacagcaacatcatgaactttttcaagaccgagattaccctggccaacggcgagatccggaagcggcctctgatcgagacaaacggcgaaaccggggagatcgtgtgggataagggccgggattttgccaccgtgcggaaagtgctgagcatgccccaagtgaatatcgtgaaaaagaccgaggtgcagacaggcggcttcagcaaagagtctatcctgcccaagaggaacagcgataagctgatcgccagaaagaaggactgggaccctaagaagtacggcggcttcgacagccccaccgtggcctattctgtgctggtggtggccaaagtggaaaagggcaagtccaagaaactgaagagtgtgaaagagctgctggggatcaccatcatggaaagaagcagcttcgagaagaatcccatcgactttctggaagccaagggctacaaagaagtgaaaaaggacctgatcatcaagctgcctaagtactccctgttcgagctggaaaacggccggaagagaatgctggcctctgccggcgaactgcagaagggaaacgaactggccctgccctccaaatatgtgaacttcctgtacctggccagccactatgagaagctgaagggctcccccgaggataatgagcagaaacagctgtttgtggaacagcacaagcactacctggacgagatcatcgagcagatcagcgagttctccaagagagtgatcctggccgacgctaatctggacaaagtgctgtccgcctacaacaagcaccgggataagcccatcagagagcaggccgagaatatcatccacctgtttaccctgaccaatctgggagcccctgccgccttcaagtactttgacaccaccatcgaccggaagaggtacaccagcaccaaagaggtgctggacgccaccctgatccaccagagcatcaccggcctgtacgagacacggatcgacctgtctcagctgggaggtgactccggcggaagctctggtggcagcaagcggaccgccgacggctctgaattcgagagccctaagaagaaaagaaaggtgagcggaggctctagcggcggaagcaccctgaacattgaagacgagtatagactgcatgaaacaagcaaggaacccgacgtgtccctgggctccacctggctgtccgactttccccaggcctgggccgagacaggaggaatgggcctggccgtgcggcaggcacccctgatcatccctctgaaggccacctctacacccgtgagcatcaagcagtaccctatgtctcaggaggccagactgggcatcaagcctcacatccagaggctgctggaccagggcatcctggtgccatgccagagcccctggaacacaccactgctgcccgtgaagaagccaggcaccaatgactatagacccgtgcaggatctgagagaggtgaacaagagggtggaggatatccaccccaccgtgcccaacccttacaatctgctgtccggcctgcccccttctcaccagtggtatacagtgctggacctgaaggatgccttcttttgtctgagactgcaccctaccagccagccactgttcgcctttgagtggagggaccctgagatgggcatctctggccagctgacctggacacgcctgcctcagggcttcaagaatagcccaacactgtttaacgaggccctgcaccgcgacctggcagatttccggatccagcacccagatctgatcctgctgcagtacgtggacgatctgctgctggccgccaccagcgagctggattgccagcagggaacacgcgccctgctgcagaccctgggaaacctgggatatagggcatccgccaagaaggcccagatctgtcagaagcaggtgaagtacctgggctatctgctgaaggagggccagagatggctgacagaggccaggaaggagacagtgatgggccagccaacacccaagaccccaagacagctgagggagttcctgggcaaagcaggattttgcaggctgttcatcccaggattcgcagagatggcagcacctctgtacccactgaccaagccgggcaccctgtttaattggggccctgaccagcagaaggcctatcaggagatcaagcaggccctgctgacagcaccagccctgggcctgccagacctgaccaagcctttcgagctgtttgtggatgagaagcagggctacgccaagggcgtgctgacccagaagctgggaccatggagacggcccgtggcctatctgtccaagaagctggacccagtggcagcaggatggccaccatgcctgaggatggtggcagcaatcgccgtgctgacaaaggatgccggcaagctgaccatgggacagccactggtcatcctggcaccacacgcagtggaggccctggtgaagcagcctccagatcgctggctgtctaacgcccggatgacacactaccaggccctgctgctggacaccgatcgcgtgcagtttggccctgtggtggccctgaatccagccaccctgctgcctctgccagaggagggcctgcagcacaactgtctggacatcctggcagaggcacacggaacaaggccagacctgaccgatcagcccctgcctgacgccgatcacacatggtataccgatggaagctccctgctgcaggagggccagaggaaggcaggagcagcagtgaccacagagacagaagtgatctgggccaaggccctgccagcaggcacatccgcccagcgggccgagctgatcgccctgacccaggccctgaagatggccgagggcaagaagctgaacgtgtacacagactccagatatgccttcgccaccgcacacatccacggagagatctacaggcgccggggctggctgacctctgagggcaaggagatcaagaacaaggatgagatcctggccctgctgaaggccctgtttctgcccaagcggctgagcatcatccactgtcctggacaccagaagggacactccgccgaggcaaggggcaatcggatggccgaccaggccgccagaaaggctgctattactgaaactcccgacacttccactctgctgattgaaaactcctccccttctggcggctcaaaaagaaccgccgacggcagcgaattcgagtctcccaagaagaagaggaaagtcggctctggccctgccgctaagagagtgaagctggactgagctggagcctcggtggccatgcttcttgccccttgggcctccccccagcccctcctccccttcctgcacccgtacccccgtggtctttgaataaagtctgagtgggcggcgtcatgaaggtttttcttttcctgagaaaacaagaaattgttttctcaggttttgctttttgaaaaaaaagcaaaagatgctggtggttggcactcctggtttccaaaaaaaaaaaaaaacaaaaaaaaaaaaaaaaaaaaaaaaaaaccaaaaaaaaaaaaaaaaaaaaaaaaaaaaaaaaaaaccccaaaaaaaaaaaaaaaaaaaaaaaaaaaaaaaaaaaaaaaaaaaaaa

SEQ ID NO: 244 - RNA, 6788 nt, synthetic construct
  source 1..6788: mol_type = other RNA
aggaaataagagagaaaagaagagtaagaagaaatataagagccaccatgaaacggacagccgacggaagcgagttcgagtcaccaaagaagaagcggaaagtcgacaagaagtacagcatcggcctggacatcggcaccaactctgtgggctgggccgtgatcaccgacgagtacaaggtgcccagcaagaaattcaaggtgctgggcaacaccgaccggcacagcatcaagaagaacctgatcggagccctgctgttcgacagcggcgaaacagccgaggccacccggctgaagagaaccgccagaagaagatacaccagacggaagaaccggatctgctatctgcaagagatcttcagcaacgagatggccaaggtggacgacagcttcttccacagactggaagagtccttcctggtggaagaggataagaagcacgagcggcaccccatcttcggcaacatcgtggacgaggtggcctaccacgagaagtaccccaccatctaccacctgagaaagaaactggtggacagcaccgacaaggccgacctgcggctgatctatctggccctggcccacatgatcaagttccggggccacttcctgatcgagggcgacctgaaccccgacaacagcgacgtggacaagctgttcatccagctggtgcagacctacaaccagctgttcgaggaaaaccccatcaacgccagcggcgtggacgccaaggccatcctgtctgccagactgagcaagagcagaaagctggaaaatctgatcgcccagctgcccggcgagaagaagaatggcctgttcggaaacctgattgccctgagcctgggcctgacccccaacttcaagagcaacttcgacctggccgaggatgccaaactgcagctgagcaaggacacctacgacgacgacctggacaacctgctggcccagatcggcgaccagtacgccgacctgtttctggccgccaagaacctgtccgacgccatcctgctgagcgacatcctgagagtgaacaccgagatcaccaaggcccccctgagcgcctctatgatcaagagatacgacgagcaccaccaggacctgaccctgctgaaagctctcgtgcggcagcagctgcctgagaagtacaaagagattttcttcgaccagagcaagaacggctacgccggctacattgacggcggagccagccaggaagagttctacaagttcatcaagcccatcctggaaaagatggacggcaccgaggaactgctcgtgaagctgaagagagaggacctgctgcggaagcagcggaccttcgacaacggcagcatcccccaccagatccacctgggagagctgcacgccattctgcggcggcaggaagatttttacccattcctgaaggacaaccgggaaaagatcgagaagatcctgaccttccgcatcccctactacgtgggccctctggccaggggaaacagcagattcgcctggatgaccagaaagagcgaggaaaccatcaccccctggaacttcgaggaagtggtggacaagggcgcttccgcccagagcttcatcgagcggatgaccaacttcgataagaacctgcccaacgagaaggtgctgcccaagcacagcctgctgtacgagtacttcaccgtgtataacgagctgaccaaagtgaaatacgtgaccgagggaatgagaaagcccgccttcctgagcggcgagcagaaaaaggccatcgtggacctgctgttcaagaccaaccggaaagtgaccgtgaagcagctgaaagaggactacttcaagaaaatcgagtgcttcgactccgtggaaatctccggcgtggaagatcggttcaacgcctccctgggcacataccacgatctgctgaaaattatcaaggacaaggacttcctggacaatgaggaaaacgaggacattctggaagatatcgtgctgaccctgacactgtttgaggacagagagatgatcgaggaacggctgaaaacctatgcccacctgttcgacgacaaagtgatgaagcagctgaagcggcggagatacaccggctggggcaggctgagccggaagctgatcaacggcatccgggacaagcagtccggcaagacaatcctggatttcctgaagtccgacggcttcgccaacagaaacttcatgcagctgatccacgacgacagcctgacctttaaagaggacatccagaaagcccaggtgtccggccagggcgatagcctgcacgagcacattgccaatctggccggcagccccgccattaagaagggcatcctgcagacagtgaaggtggtggacgagctcgtgaaagtgatgggccggcacaagcccgagaacatcgtgatcgaaatggccagagagaaccagaccacccagaagggacagaagaacagccgcgagagaatgaagcggatcgaagagggcatcaaagagctgggcagccagatcctgaaagaacaccccgtggaaaacacccagctgcagaacgagaagctgtacctgtactacctgcagaatgggcgggatatgtacgtggaccaggaactggacatcaaccggctgtccgactacgatgtggacgctatcgtgcctcagagctttctgaaggacgactccatcgacaacaaggtgctgaccagaagcgacaagaaccggggcaagagcgacaacgtgccctccgaagaggtcgtgaagaagatgaagaactactggcggcagctgctgaacgccaagctgattacccagagaaagttcgacaatctgaccaaggccgagagaggcggcctgagcgaactggataaggccggcttcatcaagagacagctggtggaaacccggcagatcacaaagcacgtggcacagatcctggactcccggatgaacactaagtacgacgagaatgacaagctgatccgggaagtgaaagtgatcaccctgaagtccaagctggtgtccgatttccggaaggatttccagttttacaaagtgcgcgagatcaacaactaccaccacgcccacgacgcctacctgaacgccgtcgtgggaaccgccctgatcaaaaagtaccctaagctggaaagcgagttcgtgtacggcgactacaaggtgtacgacgtgcggaagatgatcgccaagagcgagcaggaaatcggcaaggctaccgccaagtacttcttctacagcaacatcatgaactttttcaagaccgagattaccctggccaacggcgagatccggaagcggcctctgatcgagacaaacggcgaaaccggggagatcgtgtgggataagggccgggattttgccaccgtgcggaaagtgctgagcatgccccaagtgaatatcgtgaaaaagaccgaggtgcagacaggcggcttcagcaaagagtctatcctgcccaagaggaacagcgataagctgatcgccagaaagaaggactgggaccctaagaagtacggcggcttcgacagccccaccgtggcctattctgtgctggtggtggccaaagtggaaaagggcaagtccaagaaactgaagagtgtgaaagagctgctggggatcaccatcatggaaagaagcagcttcgagaagaatcccatcgactttctggaagccaagggctacaaagaagtgaaaaaggacctgatcatcaagctgcctaagtactccctgttcgagctggaaaacggccggaagagaatgctggcctctgccggcgaactgcagaagggaaacgaactggccctgccctccaaatatgtgaacttcctgtacctggccagccactatgagaagctgaagggctcccccgaggataatgagcagaaacagctgtttgtggaacagcacaagcactacctggacgagatcatcgagcagatcagcgagttctccaagagagtgatcctggccgacgctaatctggacaaagtgctgtccgcctacaacaagcaccgggataagcccatcagagagcaggccgagaatatcatccacctgtttaccctgaccaatctgggagcccctgccgccttcaagtactttgacaccaccatcgaccggaagaggtacaccagcaccaaagaggtgctggacgccaccctgatccaccagagcatcaccggcctgtacgagacacggatcgacctgtctcagctgggaggtgactccggcggaagctctggtggcagcaagcggaccgccgacggctctgaattcgagagccctaagaagaaaagaaaggtgagcggaggctctagcggcggaagcaccctgaacattgaagacgagtatagactgcatgaaacaagcaaggaacccgacgtgtccctgggctccacctggctgtccgactttccccaggcctgggccgagacaggaggaatgggcctggccgtgcggcaggcacccctgatcatccctctgaaggccacctctacacccgtgagcatcaagcagtaccctatgtctcaggaggccagactgggcatcaagcctcacatccagaggctgctggaccagggcatcctggtgccatgccagagcccctggaacacaccactgctgcccgtgaagaagccaggcaccaatgactatagacccgtgcaggatctgagagaggtgaacaagagggtggaggatatccaccccaccgtgcccaacccttacaatctgctgtccggcctgcccccttctcaccagtggtatacagtgctggacctgaaggatgccttcttttgtctgagactgcaccctaccagccagccactgttcgcctttgagtggagggaccctgagatgggcatctctggccagctgacctggacacgcctgcctcagggcttcaagaatagcccaacactgtttaacgaggccctgcaccgcgacctggcagatttccggatccagcacccagatctgatcctgctgcagtacgtggacgatctgctgctggccgccaccagcgagctggattgccagcagggaacacgcgccctgctgcagaccctgggaaacctgggatatagggcatccgccaagaaggcccagatctgtcagaagcaggtgaagtacctgggctatctgctgaaggagggccagagatggctgacagaggccaggaaggagacagtgatgggccagccaacacccaagaccccaagacagctgagggagttcctgggcaaagcaggattttgcaggctgttcatcccaggattcgcagagatggcagcacctctgtacccactgaccaagccgggcaccctgtttaattggggccctgaccagcagaaggcctatcaggagatcaagcaggccctgctgacagcaccagccctgggcctgccagacctgaccaagcctttcgagctgtttgtggatgagaagcagggctacgccaagggcgtgctgacccagaagctgggaccatggagacggcccgtggcctatctgtccaagaagctggacccagtggcagcaggatggccaccatgcctgaggatggtggcagcaatcgccgtgctgacaaaggatgccggcaagctgaccatgggacagccactggtcatcctggcaccacacgcagtggaggccctggtgaagcagcctccagatcgctggctgtctaacgcccggatgacacactaccaggccctgctgctggacaccgatcgcgtgcagtttggccctgtggtggccctgaatccagccaccctgctgcctctgccagaggagggcctgcagcacaactgtctggacatcctggcagaggcacacggaacaaggccagacctgaccgatcagcccctgcctgacgccgatcacacatggtataccgatggaagctccctgctgcaggagggccagaggaaggcaggagcagcagtgaccacagagacagaagtgatctgggccaaggccctgccagcaggcacatccgcccagcgggccgagctgatcgccctgacccaggccctgaagatggccgagggcaagaagctgaacgtgtacacagactccagatatgccttcgccaccgcacacatccacggagagatctacaggcgccggggctggctgacctctgagggcaaggagatcaagaacaaggatgagatcctggccctgctgaaggccctgtttctgcccaagcggctgagcatcatccactgtcctggacaccagaagggacactccgccgaggcaaggggcaatcggatggccgaccaggccgccagaaaggctgctattactgaaactcccgacacttccactctgctgattgaaaactcctccccttctggcggctcaaaaagaaccgccgacggcagcgaattcgagtctcccaagaagaagaggaaagtcggctctggccctgccgctaagagagtgaagctggactgagctggagcctcggtggccatgcttcttgccccttgggcctccccccagcccctcctccccttcctgcacccgtacccccgtggtctttgaataaagtctgagtgggcggcgtcatgaaggtttttcttttcctgagaaaacaagaaattgttttctcaggttttgctttttgaaaaaaaagcaaaagatgctggtggttggcactcctggtttccaaaaaaaaaaaaaaataaaaaaaaaaaaaaaaaaaaaaaaaaattaaaaaaaaaaaaaaaaaaaaaaaaaaaaaaaaaaattttaaaaaaaaaaaaaaaaaaaaaaaaaaaaaaaaaaaaaaaaaaaaaa

SEQ ID NO: 245 - RNA, 59 nt, synthetic construct
  source 1..59: mol_type = other RNA
aaaggtttttcttttcctgagaaatttctcaggttttgctttttaaaaaaaaagcaaaa

SEQ ID NO: 246 - RNA, 98 nt, synthetic construct
  source 1..98: mol_type = other RNA
gtcatgaaggtttttcttttcctgagaaaacaacacgtattgttttctcaggttttgctttttggcctttttctagcttaaaaaaaaaaaaagcaaaa

SEQ ID NO: 247 - RNA, 204 nt, synthetic construct
  source 1..204: mol_type = other RNA
  repeat_region 186: note = The nucleotide at position 186 can be repeated one or more times
  repeat_region 204: note = The nucleotide at position 204 can be repeated one or more times
gctgggtttttccttgttcgcaccggacacctccagtgaccagacggcaaggtttttatcccagtnnnnnnnnnnnnnnnnnnnnnnnnnnnnnnnnnnnnnnnnnnnnnnnnnnnnnnnnnnnnnnnnnnnnnnnnnnnnnnnnnnnnnnnnnnnnnnnnnnnnnnnnnnnnnnnnnnnnnnnnaaaaaaaaaaaaaaaaaaa

SEQ ID NO: 248 - RNA, 93 nt, synthetic construct
  source 1..93: mol_type = other RNA
gaaggtttttcttttcctgagaaaacaacacgtattgttttctcaggttttgctttttggcctttttctagcttaaaaaaaaaaaaagcaaaa

SEQ ID NO: 249 - RNA, 93 nt, synthetic construct
  source 1..93: mol_type = other RNA
aggtgtttcttttactgagtgcagcccatggccgcactcaggttttgcttttcaccttcccatctgtgaaagagtgagcaggaaaaagcaaaa

SEQ ID NO: 250 - protein, 672 aa, synthetic construct
TLRLEDEHRLFEKPREEATDMTRWLRDFPGAWAETAGAGEAKLQPPVVIELKSTATPVAIRQYPMTREARDGIQPHIARLLQLGVLVQCQSPWNTPLLPVKKPGTNDYRPVQDLREVNKRVQDIHPTVPNPYNLLSSIPPSRTWYTVLDLKDAFFCLKLHPDSQKLFAFEWKDPDTGSSGQLTWTRLPQGFKNSPTIFDEALHKDLAAFRARHPQVTLLQYVDDLLLAGATQEDCLTGTRGLLSELAVLGYRASAKKAQICQRKVTYLGYVLEGGQRWLTEARKETVMQIPVPTTPRQVREFLGTAGFCRLWIPGFATLAEPLYPLTKQGQPFHWGEEQQKAFQEIKKALLSAPALSLPDVEKPFTLYIDEKRGIARGVLTQTLGPWRRPVAYLSKRLDPVARGWPACLRAIAATALLVKDADKLTLGQKLTIIAPHALESIIRQPPDRWMSNARITHYQSLLLNEDRVTFGTPAALNPATLLPEVEEGREILHPCLEVLAEETGVRRDLQDTPLAMADHTWFTDGSSYLSDGQRKAGAAVVDLQKTIWASSLPEGTSAQKAELIALTKALQMAKGKRVNIYTDSRYAFATAHVHGAIYRQRGLLTSAGKEIKNKTEILELLEAVLQPKQLAIIHCPGHQKGKSEIAEGNRRADLAAREAALKPSILPLSAW

SEQ ID NO: 251 - protein, 668 aa, synthetic construct
RLEDEHRLFEKPREEATDMTRWLRDFPGAWAETAGAGEAKLQPPVVIELKSTATPVAIRQYPMTREARDGIQPHIARLLQLGVLVQCQSPWNTPLLPVKKPGTNDYRPVQDLREVNKRVQDIHPTVPNPYNLLSSIPPSRTWYTVLDLKDAFFCLKLHPDSQKLFAFEWKDPDTGSSGQLTWTRLPQGFKNSPTIFNEALHKDLAAFRARHPQVTLLQYVDDLLLAGATQEDCLTGTRGLLSELAVLGYRASAKKAQICQRKVTYLGYVLEGGQRWLTEARKETVMQIPVPTTPRQVREFLGKAGFCRLFIPGFATLAEPLYPLTKPGQPFHWGEEQQKAFQEIKKALLSAPALSLPDVEKPFTLYIDEKRGIARGVLTQTLGPWRRPVAYLSKRLDPVARGWPACLRAIAATALLVKDADKLTLGQKLTIIAPHALESIIRQPPDRWMSNARITHYQSLLLNEDRVTFGTPAALNPATLLPEVEEGREILHPCLEVLAEETGVRRDLQDTPLAMADHTWFTDGSSYLSDGQRKAGAAVVDLQKTIWASSLPEGTSAQKAELIALTKALQMAKGKRVNIYTDSRYAFATAHVHGAIYRQRGWLTSAGKEIKNKTEILELLEAVLQPKQLAIIHCPGHQKGKSEIAEGNRRADLAAREAALKPSILPLS

SEQ ID NO: 252 - protein, 679 aa, synthetic construct
TLRLEDEHRLFEKPREEATDMTRWMRDFPGAWAETAGAGEAKLQPPVVIELKSTATPVAIRQYPMTREARDGIQPHIARLLQLGVLVQCQSPWNTPLLPVKKPGTNDYRPVQDLREVNKRVQDIHPTVPNPYNLLSSIPPDRTWYTVLDLKDAFFCLKLHPDSQKLFAFEWKNPDTGSSGQLTWTRLPQGFKNSPTIFNEALHKDLAAYRARNPQVTLLQYVDDLLLAGATQEDCLTGTKGLLSELAVLGYRASAKKAQICQRKVTYLGYVLEGGQRWLTEGRMATVMQIPVPTTPRQVREFLGKAGFCRLFIPGFATLAEPLYPLTKPGQPFHWGEEQQKAFQEIKKALLSAPALSLPNVEKPFTLYIDEKRGIARGVLTQTLGPWRRPVAYLSKRLDSVARGWPACLRAIAATALLVKDADKLTLGQKLTIIAPHALESIIRQPPDRWMSNARITHYQSLLLNEERVTFGTPAALNPATLLPEVEEGREILHPCLEVLAEETGVRRDLQDTPLAMADHTWFTDGSSYLSDGQRKAGAAVVDLQKTIWASSLPEGTSAQKAELIALTKALQMAKGKRVNIYTDSRYAFATAHVHGAIYQQRGWLTSAGKEIKNKTEILELLEAVLQPKQLAIIHCPGHQKGKSEIAEGNRRADLAAREAALKPSILPLSAWPIRTPRP

SEQ ID NO: 253 - protein, 672 aa, synthetic construct
TLRLEDEHRLFEKPREEATDMTRWMRDFPGAWAETAGAGEAKLQPPVVIELKSTATPVAIRQYPMTREARDGIQPHIARLLQLGVLVQCQSPWNTPLLPVKKPGTNDYRPVQDLREVNKRVQDIHPTVPNPYNLLSSIPPDRTWYTVLDLKDAFFCLKLHPDSQKLFAFEWKNPDTGSSGQLTWTRLPQGFKNSPTIFNEALHKDLAAYRARNPQVTLLQYVDDLLLAGATQEDCLTGTKGLLSELAVLGYRASAKKAQICQRKVTYLGYVLEGGQRWLTEGRMATVMQIPVPTTPRQVREFLGKAGFCRLFIPGFATLAEPLYPLTKPGQPFHWGEEQQKAFQEIKKALLSAPALSLPNVEKPFTLYIDEKRGIARGVLTQTLGPWRRPVAYLSKRLDSVARGWPACLRAIAATALLVKDADKLTLGQKLTIIAPHALESIIRQPPDRWMSNARITHYQSLLLNEERVTFGTPAALNPATLLPEVEEGREILHPCLEVLAEETGVRRDLQDTPLAMADHTWFTDGSSYLSDGQRKAGAAVVDLQKTIWASSLPEGTSAQKAELIALTKALQMAKGKRVNIYTDSRYAFATAHVHGAIYQQRGWLTSAGKEIKNKTEILELLEAVLQPKQLAIIHCPGHQKGKSEIAEGNRRADLAAREAALKPSILPLSAW

SEQ ID NO: 254 - protein, 673 aa, synthetic construct
TLQLEDEHRLFENNVRGDERIAEWLQQYPKAWAETAGMGLATERPPVIVELKSTATPIAVRQYPMAKEAWRGIKIHIQRLLHLGVLVKCHSPWNTPLLPVKKPGTNDYRPVQDLREVNKRVQDIHPTVPNPYNLLSSIPPSHVWYSVLDLKDAFFCLRLHPASQNIFAFEWRDPDSGMTGQLTWTRLPQGFKNSPTIFDEALHQDLAAFRADHPQVTLLQYVDDLLLAGATKEDCEAGTRALLLELSRLGYRASAKKAQICQRRVTYLGYALEGGKRWLTEARKSTVTQIPRPQTPRQVREFLGTAGFCRLWIPGFATLAEPLYPLTKQGNPFEWGETHQKAFDNIKRALLSAPALALPDVAKPFTLFIDERKGVARGVLTQTLGPWKRPVAYLSKRLDPVARGWPGCLRAIAATALLVRDADKLTLGQKLTVVAPHTLESIIRQPPDRWMSNARMTHYQSLLLNEDRVHFGAPVVLNPATLLPEVDPEGKEVLHSCRDILAEETGPRKDLKDSPLAGPQLTWFTDGSSYLYEGKRVAGAAVVDQDRTIWASSLPEGTSAQKAELIALTQALRLAEGNRANIYTDSRYAFATAHVHGAIYRQRGLLTSAGKEIKNKQEILDLLEAVHAPREVAIIHCPGHQKGTSEVAMGNRKADAEARQAALGPRVFTLAAG

SEQ ID NO: 255 - protein, 669 aa, synthetic construct
QLEDEHRLFENNVRGDERIAEWLQQYPKAWAETAGMGLATERPPVIVELKSTATPIAVRQYPMAKEAWRGIKIHIQRLLHLGVLVKCHSPWNTPLLPVKKPGTNDYRPVQDLREVNKRVQDIHPTVPNPYNLLSSIPPSHVWYSVLDLKDAFFCLRLHPASQNIFAFEWRDPDSGMTGQLTWTRLPQGFKNSPTIFNEALHQDLAAFRADHPQVTLLQYVDDLLLAGATKEDCEAGTRALLLELSRLGYRASAKKAQICQRRVTYLGYALEGGKRWLTEARKSTVTQIPRPQTPRQVREFLGKAGFCRLFIPGFATLAEPLYPLTKPGNPFEWGETHQKAFDNIKRALLSAPALALPDVAKPFTLFIDERKGVARGVLTQTLGPWKRPVAYLSKRLDPVARGWPGCLRAIAATALLVRDADKLTLGQKLTVVAPHTLESIIRQPPDRWMSNARMTHYQSLLLNEDRVHFGAPVVLNPATLLPEVDPEGKEVLHSCRDILAEETGPRKDLKDSPLAGPQLTWFTDGSSYLYEGKRVAGAAVVDQDRTIWASSLPEGTSAQKAELIALTQALRLAEGNRANIYTDSRYAFATAHVHGAIYRQRGWLTSAGKEIKNKQEILDLLEAVHAPREVAIIHCPGHQKGTSEVAMGNRKADAEARQAALGPRVFTLA

SEQ ID NO: 256 - protein, 741 aa, synthetic construct
MGIHQFLYLPNSPKPLLGRDLLENLGAIIKFNKDKLEFQVNDEQLITALSLTISCVEPKPENHNFEQILSKTYPLVWATDIPGKSKRATPIVVELKVGARPVVRKQYPLRIEDRKGIEPIIKRFLELGLLVECESDFNTPILPVKKPNGTYRLVQDLRAVNEITKTLHPVVANPYTLLTRLKDSLAWFTVLDLKDAFFCLPLAPESQRIFAFEWESVDRGRKTQLTWTRLPQGWSNSPTIFGNQLAKELEQWEGPPGDGALLQYVDDLLIATVTEEECIEWTISLLNFLGLSGYRVSQQKAQLVQKEVVYLGYEISRGQRSLGAARKEAICQMPKPETVRDLRAFLGMTGWCRLWIYQYGILAKPLYDLLKETKNVLVWTPEAEGAFKRLKRELMRAPALGLPDVSKPFWLFSHERQGMALGVLAQQLGPHKRAVAYFSKRLDEVSKGWPGCLRAVAAVIINIEEARKFTLGQKVTVLVSHTVSAVLEQKGNHWLSPSRFLKYQAILAESDDVTIQVTNIVNPASFLEGRAPAEPIEHDCLETIEAVYSSRPDLKEEPFEGADNWFSDGSSFVRQGVRMAGYAVTTTERVIESNPLPAGTSSQKAELIALTRALELAENMQINIWTDSKYAFSVVHAHGAIWKERGLLTTQGKTVKHAGEVLRLLEAVQLPTQVAIMHCKGHLKGNTIPEIGNRKADTEAKLVAIRNKEAEIAALIPGELDINIQPDYQESDHKWIQRNKG

SEQ ID NO: 257 - protein, 675 aa, synthetic construct
QVNDEQLITALSLTISCVEPKPENHNFEQILSKTYPLVWATDIPGKSKRATPIVVELKVGARPVVRKQYPLRIEDRKGIEPIIKRFLELGLLVECESDFNTPILPVKKPNGTYRLVQDLRAVNEITKTLHPVVANPYTLLTRLKDSLAWFTVLDLKDAFFCLPLAPESQRIFAFEWESVDRGRKTQLTWTRLPQGWSNSPTIFGNQLAKELEQWEGPPGDGALLQYVDDLLIATVTEEECIEWTISLLNFLGLSGYRVSQQKAQLVQKEVVYLGYEISRGQRSLGAARKEAICQMPKPETVRDLRAFLGMTGWCRLWIYQYGILAKPLYDLLKETKNVLVWTPEAEGAFKRLKRELMRAPALGLPDVSKPFWLFSHERQGMALGVLAQQLGPHKRAVAYFSKRLDEVSKGWPGCLRAVAAVIINIEEARKFTLGQKVTVLVSHTVSAVLEQKGNHWLSPSRFLKYQAILAESDDVTIQVTNIVNPASFLEGRAPAEPIEHDCLETIEAVYSSRPDLKEEPFEGADNWFSDGSSFVRQGVRMAGYAVTTTERVIESNPLPAGTSSQKAELIALTRALELAENMQINIWTDSKYAFSVVHAHGAIWKERGLLTTQGKTVKHAGEVLRLLEAVQLPTQVAIMHCKGHLKGNTIPEIGNRKADTEAKLVAIRNKEAEIA

SEQ ID NO: 258 - protein, 673 aa, synthetic construct
TLQLEDEHRLFEGKVQEDGRIAEWLQQYPEAWAETAGMGLAAERPPVVVELKSTATPIAVRQYPMAKEAWRGIKVHIQRLLHLGVLVKCQSPWNTPLLPVKKPGTDDYRPVQDLREVNKRVQDIHPTVPNPYNLLSAIPPSHVWYSVLDLKDAFFCLRLHPASQNIFAFEWRDPDSGMTGQLTWTRLPQGFKNSPTIFDEALHQDLAAFRADHPRVTLLQYVDDLLLAGATKEDCEAGTRALLLELSRLGYRASAKKAQICRRKVTYLGYALEGGKRWLTEARKSTVTQIPRPQTPRQVREFLGTAGFCRLWIPGFATLAEPLYPLTKQGNPFEWGEAHQKAFDNIKEALLSAPALALPDVAKPFTLFIDERKGVARGVLTQTLGPWKRPVAYLSKRLDPVARGWPGCLRAIAATALLVKDADKLTLGQKLTVVAPHALESIIRQPPDRWMSNARMTHYQSLLLNEDRVHFGAPVVLNPATLLPEVNPEGKEVLHSCHDILAEETGPRRDLKDSPLAGPQLTWFTDGSSYLHEGKRVAGAAVVDRDRTIWASSLPEGTSAQKAELIALTQALRLAEGRRANIFTDSRYAFATAHVHGAIYHQRGLLTSAGKEIKNKQEILDLLEAVHAPREVAIIHCPGHQKGTSETAVGNRKADAEARQAALGPRIFALAAG

SEQ ID NO: 259 - protein, 669 aa, synthetic construct
QLEDEHRLFEGKVQEDGRIAEWLQQYPEAWAETAGMGLAAERPPVVVELKSTATPIAVRQYPMAKEAWRGIKVHIQRLLHLGVLVKCQSPWNTPLLPVKKPGTDDYRPVQDLREVNKRVQDIHPTVPNPYNLLSAIPPSHVWYSVLDLKDAFFCLRLHPASQNIFAFEWRDPDSGMTGQLTWTRLPQGFKNSPTIFNEALHQDLAAFRADHPRVTLLQYVDDLLLAGATKEDCEAGTRALLLELSRLGYRASAKKAQICRRKVTYLGYALEGGKRWLTEARKSTVTQIPRPQTPRQVREFLGKAGFCRLFIPGFATLAEPLYPLTKPGNPFEWGEAHQKAFDNIKEALLSAPALALPDVAKPFTLFIDERKGVARGVLTQTLGPWKRPVAYLSKRLDPVARGWPGCLRAIAATALLVKDADKLTLGQKLTVVAPHALESIIRQPPDRWMSNARMTHYQSLLLNEDRVHFGAPVVLNPATLLPEVNPEGKEVLHSCHDILAEETGPRRDLKDSPLAGPQLTWFTDGSSYLHEGKRVAGAAVVDRDRTIWASSLPEGTSAQKAELIALTQALRLAEGRRANIFTDSRYAFATAHVHGAIYHQRGWLTSAGKEIKNKQEILDLLEAVHAPREVAIIHCPGHQKGTSETAVGNRKADAEARQAALGPRIFALA

SEQ ID NO: 260 - protein, 675 aa, synthetic construct
QVNDEQLITALSLTISCVGPKPENHNFERILSKTYPLVWATDIPGKSKRATPIVVELKVGARPVVRKQYPLRIEDRKGIEPIIKRFLELGLLVECESDFNTPILPVKKPNGTYRLVQDLRAVNEITKTLHPVVANPYTLLTRLKDSLAWFTVLDLKDAFFCLPLAPESQRIFAFEWESVDRGRKTQLTWTRLPQGWSNSPTIFNNQLAKELEQWEGPPGDGALLQYVDDLLIATVTEEECIEWTISLLNFLGLSGYRVSQQKAQLVQKEVVYLGYEISRGQRSLGAARKEAICQMPKPETVRDLRAFLGKTGWCRLFIYQYGILAKPLYDLLKPTKNVLVWTPEAEGAFKRLKRELMRAPALGLPDVSKPFWLFSHERQGMALGVLAQQLGPHKRAVAYFSKRLDEVSKGWPGCLRAVAAVIINIEEARKLTLGQKVTVLVSHTVSAVLEQKGNHWLSPSRFLKYQAILAESDDVTIQVTNIVNPASFLEGRAPAEPIEHDCLETIEAVYSSRPDLKEEPFEDADNWFSDGSSFVKQGVRMAGYAVTTTERVIESNPLPAGTSAQKAELIALTRALELAKDMQINIWTDSKYAFSVVHAHGAIWKERGWLTTQGKTVKHAEEVLRLLEAVQLPTQVAIMHCKGHLKGNTIPEIGNRKADTEAKLAAARNREAEIA

SEQ ID NO: 261 - protein, 713 aa, synthetic construct
MPNSPRALLGRDLLEQLQATITFKKGEITLEVNDQKYIELLSLTLTAIGIKEEIDEEILSQVFPGVWASDVPGRAKNASPIIIKLKEGAQPVRIKQYPLKKEDREGISPIIENFLRLGLLKECQSDFNTPILPVRKPDGSYRIVQDLRAVNKITEDLYPVVANPYTLLTCLTPELTWFTVLDLKDAFFCLPIHKASQKIFAFEWESPKSGRKTQLTWTRLPQGWKNSPTLFGEKLAKDLESWEAPQEEGRLLQYVDDLLVATQTREACVAWTVSLLNLLGLQGYRVSKKKAQIVKQKVIYLGYEVSAGQRTLGQARKEAICQTPKPQTIKELQTFLGMAGWCRLWVYNYGLLVRPLYALIADGSRDLQWTKEATRAFHQLKNALMSAPALGLPDVSKPFFLFSHKKQGIALGILAQDLGPYRRAVAYLSKQLDATAKGWPGCLRAVAAVVLNIQEARKFTLGQKLTVLVSHTVSAVLEVKGGHWLSPQRFLKYQAIMVEQDDVEIVVTNIVNSASFLSGNQGEAVHHDCLETIEATYSSRPDLKDTPLEDAETWFTDGSSYITNGKRHAGYAVTTYREVIESGPLPTGTSAQKAEIIALTRALERAKGRRINIYTDSRYAFGVVHAHGAIWKERGLLTSQGKNMKHAQEIIQLLEAVQLPEKVAIMHIKAHQKVSSELEEGNELADREAKEAARGEVATEGALIPDGQISLEG

SEQ ID NO: 262 - protein, 671 aa, synthetic construct
EVNDQKYIELLSLTLTAIGIKEEIDEEILSQVFPGVWASDVPGRAKNASPIIIKLKEGAQPVRIKQYPLKKEDREGISPIIENFLRLGLLKECQSDFNTPILPVRKPDGSYRIVQDLRAVNKITEDLYPVVANPYTLLTCLTPELTWFTVLDLKDAFFCLPIHKASQKIFAFEWESPKSGRKTQLTWTRLPQGWKNSPTLFGEKLAKDLESWEAPQEEGRLLQYVDDLLVATQTREACVAWTVSLLNLLGLQGYRVSKKKAQIVKQKVIYLGYEVSAGQRTLGQARKEAICQTPKPQTIKELQTFLGMAGWCRLWVYNYGLLVRPLYALIADGSRDLQWTKEATRAFHQLKNALMSAPALGLPDVSKPFFLFSHKKQGIALGILAQDLGPYRRAVAYLSKQLDATAKGWPGCLRAVAAVVLNIQEARKFTLGQKLTVLVSHTVSAVLEVKGGHWLSPQRFLKYQAIMVEQDDVEIVVTNIVNSASFLSGNQGEAVHHDCLETIEATYSSRPDLKDTPLEDAETWFTDGSSYITNGKRHAGYAVTTYREVIESGPLPTGTSAQKAEIIALTRALERAKGRRINIYTDSRYAFGVVHAHGAIWKERGLLTSQGKNMKHAQEIIQLLEAVQLPEKVAIMHIKAHQKVSSELEEGNELADREAKEAARGEVATEG

SEQ ID NO: 263 - protein, 741 aa, synthetic construct
MGIHQFLYLPNSPKPLLGRDLLENLGAIIKFNKDKLEFQVNDEQLITALSLTISCVGPKPENHNFERILSKTYPLVWATDIPGKSKRATPIVVELKVGARPVVRKQYPLRIEDRKGIEPIIKRFLELGLLVECESDFNTPILPVKKPNGTYRLVQDLRAVNEITKTLHPVVANPYTLLTRLKDSLAWFTVLDLKDAFFCLPLAPESQRIFAFEWESVDRGRKTQLTWTRLPQGWSNSPTIFGNQLAKELEQWEGPPGDGALLQYVDDLLIATVTEEECIEWTISLLNFLGLSGYRVSQQKAQLVQKEVVYLGYEISRGQRSLGAARKEAICQMPKPETVRDLRAFLGMTGWCRLWIYQYGILAKPLYDLLKETKNVLVWTPEAEGAFKRLKRELMRAPALGLPDVSKPFWLFSHERQGMALGVLAQQLGPHKRAVAYFSKRLDEVSKGWPGCLRAVAAVIINIEEARKLTLGQKVTVLVSHTVSAVLEQKGNHWLSPSRFLKYQAILAESDDVTIQVTNIVNPASFLEGRAPAEPIEHDCLETIEAVYSSRPDLKEEPFEDADNWFSDGSSFVKQGVRMAGYAVTTTERVIESNPLPAGTSAQKAELIALTRALELAKDMQINIWTDSKYAFSVVHAHGAIWKERGLLTTQGKTVKHAEEVLRLLEAVQLPTQVAIMHCKGHLKGNTIPEIGNRKADTEAKLAAARNREAEIAALIPGELDINIQPDYQESDHRWIQRKKG

SEQ ID NO: 264 - protein, 675 aa, synthetic construct
QVNDEQLITALSLTISCVEPKPENHNFERILSKTYPLVWATDIPGKSKRATPIVVELKVGARPVVRKQYPLRIEDRKGIEPIIKRFLELGLLVECESDFNTPILPVKKPNGTYRLVQDLRAVNEITKTLHPVVANPYTLLTRLKDSLAWFTVLDLKDAFFCLPLAPESQRIFAFEWESVDRGRKTQLTWTRLPQGWSNSPTIFGNQLAKELEQWEGPPGDGALLQYVDDLLIATVTEEECIEWTISLLNFLGLSGYRVSQQKAQLVQKEVVYLGYEISRGQRSLGAARKEAICQMPKPETVRDLRAFLGMTGWCRLWIYQYGILAKPLYDLLKETKNVLVWTPEAEGAFKRLKRELMRAPALGLPDVSKPFWLFSHERQGMALGVLAQQLGPHKRAVAYFSKRLDEVSKGWPGCLRAVAAVIINIEEARKLTLGQKVTVLVSHTVSAVLEQKGNHWLSPSRFLKYQAILAESDDVTIQVTNIVNPASFLEGRAPAEPIEHDCLETIEAVYSSRPDLKEEPFEDADNWFSDGSSFVKQGVRMAGYAVTTTERVIESNPLPAGTSAQKAELIALTRALELAENMQINIWTDSKYAFSVVHAHGAIWKERGLLTTQGKTVKHAEEVLRLLEAVQLPTQVAIMHCKGHLKGNTIPEIGNRKADTEAKLAAARNREAEIA

SEQ ID NO: 265 - protein, 679 aa, synthetic construct
EFQVNDEQLITALSLTISCVEPKPENHNFERILSKTYPLVWATDIPGKSKRATPIVVELKVGARPVVRKQYPLRIEDRKGIEPIIKRFLELGLLVECESDFNTPILPVKKPNGTYRLVQDLRAVNEITKTLHPVVANPYTLLTRLKDSLAWFTVLDLKDAFFCLPLAPESQRIFAFEWESVDRGRKTQLTWTRLPQGWSNSPTIFGNQLAKELEQWEGPPGDGALLQYVDDLLIATVTEEECIEWTISLLNFLGLSGYRVSQQKAQLVQKEVVYLGYEISRGQRSLGAARKEAICQMPKPETVRDLRAFLGMTGWCRLWIYQYGILAKPLYDLLKETKNVLVWTPEAEGAFKRLKRELMRAPALGLPDVSKPFWLFSHERQGMALGVLAQQLGPHKRAVAYFSKRLDEVSKGWPGCLRAVAAVIINIEEARKLTLGQKVTVLVSHTVSAVLEQKGNHWLSPSRFLKYQAILAESDDVTIQVTNIVNPASFLEGRAPAEPIEHDCLETIEAVYSSRPDLKEEPFEDADNWFSDGSSFVKQGVRMAGYAVTTTERVIESNPLPAGTSAQKAELIALTRALELAENMQINIWTDSKYAFSVVHAHGAIWKERGLLTTQGKTVKHAEEVLRLLEAVQLPTQVAIMHCKGHLKGNTIPEIGNRKADTEAKLAAARNREAEIAAL

SEQ ID NO: 266 - protein, 673 aa, synthetic construct
TLRLEDEHRLFQPTGKTPADLDHWLREFPRAWAETAGAGEATQQPPVIIELKAAATPIAVRQYPMPREAREGIQPHITRLLGLGFLVKCQSPWNTPLLPVKKPGTNDYRPVQDLREVNKRVQDIHPTVPNPYNLLSTIPAGHIWYTVLDLKDAFFCLKLHPESQKLFAFEWKDLESGDSGQLTWTRLPQGFKNSPTIFDEALHKDLAIFRAEHPQVTLLQYVDDLLLAGATEEECLAGTRGLLSELSKLGYRASAKKAQICQKRVTYLGYALEGGQRWLTEERKTTVLQIPTPQTPRQVREFLGTAGFCRLWIPGFATMAEPLYPLTKQGQPFHWGKEHQKAFLDIKEALLSAPALALPDVEKPFTLYVDERKGVARGVLTQALGPWKRPVAYLSKRLDPVARGWPACLRAIAATALLVKDTDKLTLGQKLTVIAPHALESIIRQPPDRWISNARVTHYQSLLLDEGRITFGAPVTLNPATLLPTEGEEGQEVLHPCLEILAEETGVRRDLKDTPLTRADYTWFTDGSSFLLDGQRKAGAAVVDLQDTVWASSLPEGTSAQKAELIALTKALQLAEGKAVNIYTDSRYAFATAHVHAAIYRQRGLLTSAGKEIKNKAEILQLLEAVLLPRQLAIIHCPGHQKGKSEVAEGNRRADLAAKEVALQPSILPLTAW

SEQ ID NO: 267 - protein, 669 aa, synthetic construct
RLEDEHRLFQPTGKTPADLDHWLREFPRAWAETAGAGEATQQPPVIIELKAAATPIAVRQYPMPREAREGIQPHITRLLGLGFLVKCQSPWNTPLLPVKKPGTNDYRPVQDLREVNKRVQDIHPTVPNPYNLLSTIPAGHIWYTVLDLKDAFFCLKLHPESQKLFAFEWKDLESGDSGQLTWTRLPQGFKNSPTIFNEALHKDLAIFRAEHPQVTLLQYVDDLLLAGATEEECLAGTRGLLSELSKLGYRASAKKAQICQKRVTYLGYALEGGQRWLTEERKTTVLQIPTPQTPRQVREFLGKAGFCRLFIPGFATMAEPLYPLTKPGQPFHWGKEHQKAFLDIKEALLSAPALALPDVEKPFTLYVDERKGVARGVLTQALGPWKRPVAYLSKRLDPVARGWPACLRAIAATALLVKDTDKLTLGQKLTVIAPHALESIIRQPPDRWISNARVTHYQSLLLDEGRITFGAPVTLNPATLLPTEGEEGQEVLHPCLEILAEETGVRRDLKDTPLTRADYTWFTDGSSFLLDGQRKAGAAVVDLQDTVWASSLPEGTSAQKAELIALTKALQLAEGKAVNIYTDSRYAFATAHVHAAIYRQRGWLTSAGKEIKNKAEILQLLEAVLLPRQLAIIHCPGHQKGKSEVAEGNRRADLAAKEVALQPSILPLT

SEQ ID NO: 268 - protein, 741 aa, synthetic construct
MGIHQFLYLPNSPKPLLGRDLLENLGAVMKFNKDKLGFQVNEEQLITALSLTISCVEPKPENHNFEQILSETYPLVWATDIPGRSKQAAPIVVELKVGAKPVKRKQYPLRIEDRKGIEPIIKRFLELGLLVECESDFNTPILPVKKPNGAYRLVQDLRVVNEITKTLHPVVANPYTLLTRLKENLAWFTVLDLKDAFFCLPLAPESQKIFAFEWESVDRGRKTQLTWTVLPQGWSNSPTIFGNQLAKELEQWERPLGDGTLLQYVDDLLIGTVTEEECIEWTISLLNFLGLSGYRVSQQKAQLVQKEVVYLGYEVSRGQRSLGAARKEAICQMPKPETVRDLRAFLGMTGWCRLWIYQYGILAKPLYDLLKGTKNVLVWTPEAEGAFKKLRLELMRAPALGLPDVSKPFWLFSHERQGMALGVLAQQVGPHKRAVAYFSKQLDEVSKGWPGCLRAVAAVIINIEEARKLTLGQKVTVLVSHTVSAVLEQKGNHWLSPSRFLKYQAILAESDDVTIQVTNIVNPASFLKGRAPAEPIEHDCLETIEAIYSSRPDLKEEPFEDADNWFSDGSSFVRRGVRMAGYAVTTTERVIESNPLPAGTSAQKAELIALTRALELAENMQINIWTDSKYAFSVVHAHGAIWKERGLLTTQGKTVKHAEEVLRLLKAVQLPAQVAIMHCKGHLKGNTIPEIGNRKADAEAKLAVTRAREVKVTALIPGELDTNIQPDYQESDHRWIQRNKG

SEQ ID NO: 269 - protein, 675 aa, synthetic construct
QVNEEQLITALSLTISCVEPKPENHNFEQILSETYPLVWATDIPGRSKQAAPIVVELKVGAKPVKRKQYPLRIEDRKGIEPIIKRFLELGLLVECESDFNTPILPVKKPNGAYRLVQDLRVVNEITKTLHPVVANPYTLLTRLKENLAWFTVLDLKDAFFCLPLAPESQKIFAFEWESVDRGRKTQLTWTVLPQGWSNSPTIFGNQLAKELEQWERPLGDGTLLQYVDDLLIGTVTEEECIEWTISLLNFLGLSGYRVSQQKAQLVQKEVVYLGYEVSRGQRSLGAARKEAICQMPKPETVRDLRAFLGMTGWCRLWIYQYGILAKPLYDLLKGTKNVLVWTPEAEGAFKKLRLELMRAPALGLPDVSKPFWLFSHERQGMALGVLAQQVGPHKRAVAYFSKQLDEVSKGWPGCLRAVAAVIINIEEARKLTLGQKVTVLVSHTVSAVLEQKGNHWLSPSRFLKYQAILAESDDVTIQVTNIVNPASFLKGRAPAEPIEHDCLETIEAIYSSRPDLKEEPFEDADNWFSDGSSFVRRGVRMAGYAVTTTERVIESNPLPAGTSAQKAELIALTRALELAENMQINIWTDSKYAFSVVHAHGAIWKERGLLTTQGKTVKHAEEVLRLLKAVQLPAQVAIMHCKGHLKGNTIPEIGNRKADAEAKLAVTRAREVKVT

SEQ ID NO: 270 - protein, 1096 aa, synthetic construct
MDKKLILGLDIGITSVGWGIINEQNQIIKAGVRLFEEADSENNKKRRSFRGQRRLKNRKKLRILDMRQLLFKHGYIPTIDYIPTVDPYQSRLKGLTEKLSKDELASALIQFSKRRGSNLETVEESKNEESPKFILQKHDNLLVKDKHVVHLQIDARNQFGAIRGHENVYRTNQYESEIKQILASQQVSEDFIKSVLSIIRRRRHFSEGPGSLKSPTPYGRYRSIEPSIKHEIISSFNEIDKNRYKKEKFTINYKDTNYLVLSNGDIINKDPLNLIEIMRGKCSIYPEELRAPKNAVSAEIYNLLNDLTNLTIISQENRKLSKEEKKNALNYLLQNGYFKPKGAKGLLKLLNLDQSDVKGFRVNNKEEALITELEGYFKIKKALSNVINPDDYSIEFYDTVAEVLTSTLVIDERRKLMEPLNLNSSELKTMSELTGINGYHAFSLKALRILNQELLQDDYNAQQIIKLTDKLNISNKLSLSENVILSPVARRAQQEAFKVVDALMKEFGQFDRIVVETTRDKNSKEQAANIRDRQKKQEKSKLDAETELKNLIGDSSIDFKPIMIQKMRLYKEQNGKCAYSGIQIDLHKLITDPKAYEVDHIIPFSISLDDSYNNKVLIAPLANQIKGNLTPFSYFKSGKVDSRFVIKNYETFKEIVMNNQNISKYKRANLLDERDITKYDVMKEFVNRNLVDTSYAIRTFMMTLKQYFENHDINTSVTTIKGKQTDLFRSIARTQWFRDHQDSEDRNPFEKNRNFYSHHAIDALIIAGLSNQKLFNYLFNVAKNESGLAHDPKTGELFEADPKKDSSFFLFSKSIANLEESDIRFSWKKDTKPNRSISDQSIYSTRNIDGVHYIVNTYENIYGMDKDKLSKIFNEKNKKKLLMYHHDKKSYELVEKAFKQYSHEQKPFLTYEQNHGKLRKHGIINGPIITNLKYYESKLGSHIDITKNLSSKRKVVLLSMSTYRVDIYKSIQGNYKFVTVRPNEFRIVDDKFHLDKTVYNNKMIEKGIDNQFEFQFSLNRNEIVEILYFDGTKKTVRFISSKDDPKNILEFKSIDHVDTDRIAPTIGKTIVKITKYYVGITGKRYIAKKETLKMQI

SEQ ID NO: 271 - protein, 1128 aa, synthetic construct
MSDLVLGLDIGIGSVGVGILNKVTGEIIHKNSRIFPAAQAENNVERRTNRQGRRLTRRKKHRRVRLNHLFEESGLITDFTKVSINLNPYQLRVKGLIDELSNEELFIALKNMVKHRGISYLDDASDDGNSSVGDYAQIVKENSKQLETKTPGQIQLERYQKYGQLRGDFTVEEDGKKHRLINVFPTSAYRAEALRILQTQQEFNPQITDEFINRYLEILTGKRKYYHGPGNEKSRTDYGRYTTKKDSEDEYITLDNIFGILIGKCTFYPEEYRAAKASCTAQEFNLLNDLNNLTVPTETKKLSEEQKNQIINYVKNEKAMGPAKLFKYIAKLLSCDVADIKGYRIDKSDKAEIHTFEAYRKMKTLETLDVKKMAREELDKLAYVLTLNTEKEGIQEAIEHEFADGTFSQEQVDELVQFRKANSSIFGKGWHNFSVKLMMELIPELYATPEEQMTILKRLGKQKTTSSSNKTKYIDERLLTEEIYNPVVAKSVRQAIKIVNAAIKEYGDFDNIVIEMARETNEDDEKKAIQKIQKANKDEKDAAMLKAANQYNGKAELPHSVFHGHKQLATKIRLWHQQGERCLYTGKTISIHDLINNPNQFEIDHILPLSITFDDSLANKVLVYATANQEKGQRTPYQALDSMDDAWSFRELKAFVRESKALSNKKKEYLLTEEDISKFDVRKKFIERNLVDTRYASRVVLNALQEHFRFHKTDTKVSVVRGQFTSQLRRHWGIEKTRDTYHHHAVDALIIAASSQLNLWKKQKNTLVSYSEDQLLDIETGELISDDEYKESVFKAPYQHFVDTLKSKEFEDSILFSYQVDSKFNRKISDATIYATRQAKVGKDKKDETYVLGKIKDIYTQDGYDAFMKIYKKDKSKFLMYRHDPQTFEKVIEPILENYPNKEMNEKGKEVPCNPFLKYKEEHGYIRKYSKKGNGPEIKSLKYYDKNIPESFINITPHNSKNKVILRQLNPWRTDVYFNPQTDKYELLGLKYADLQFEKGTGTYKISQEKYDDIKKKEGVDSDSEFKFTLYKNDLLLIKDTETKEQQLFRFLSRTMPKKKHYVELKPYNKQKFEGNESLINVLGVVAKGGQCKKGMSKTNISIYKVRTDVLGNQHIIKNEGDKPKLDF

SEQ ID NO: 272 - protein, 1127 aa, synthetic construct
MSDLVLGLDIGIGSVGVGILNKVTGEIIHKNSRIFPAAQAENNVERRINRQGRRLTRRKKHRRVRLNHLFEESGLITDFTNVSINLNPYQLRVKGLTDELSNEELFIALKNMVKHRGISYLDDASDDGNSSVGDYAQIVKENSKQLETKTPGQIQLERYQKYGQLRGDFTVEEDGKKHRLINVFPTSAYRAEALRILQTQQEFNPQITDEFINSYLQILTGKRKYYHGPGNEKSRTDYGRYTTKKDSEDEYITLDNIFGILIGKCTFYPEEYRAAKASYTAQEFNLLNDLNNLTVPTETKKLSEEQKNQIITNVKNEKAMGPAKLFKYIAKLLSCDVADIKGYRIDKSDKAEIHTFEAYRKMKTLATIDIEQMERENLDKLAYVLTLNTEKEGIQEALEHEFADGTFSQEQIDELVQFRKANSSIFGKGWHSFSVKLMMELIPELYATSEEQMTILTRLGKQKTTSSSNKTKYIDEKQLTEEIYNPVAAKSVRQAIKIVNAAIKEYGDFDNIVIEMARETNEDDEKKAIQKIQKANKDEKDAAMLKAANQYNGKAELPHSVFHGHKQLATKIRLWHQQGERCLYTGKTISIHDLINNSNQFEIDHILPLSITFDDSLANKVLVYATANQEKGQRTPYQALDSMDDAWSFRELKAFVRDSKALSNKKKEYLLTEEDISKFDVRKKFIERNLVDTRYASRVVLNALQEHFRVHKTDTKVSVVRGQFTSQLRRHWGIEKTRDTYHHHAVDALIIAASSQLNLWKKQKNTLVSYSEDQLLDIETGELISDDEYKESVFKAPYQHFVDTLKSKEFEDSILFSYQVDSKFNRKISDATIYATRQAKVGKDKKDETYVLGKIKDIYSQTGYDAFIKIYKKDKSKFLMYRHDPQTFEKVIEPILENYPNKELNEKGKEVPCNPFLKYKEDHGYIRKYSKKGNGPEIKSLKYYDSKLGNHIDITPKNSNNKVVLQSVSPWRADVYFNKTTGKYEILGLKYADLKFEKGTGTYKISEEKYNDIKIKEGVDSDSEFKFTLYKNDLLLIKDTETKEQQLFRFLSRTMPNVKHYVELKPYDKQKFDDNEELIKILGIVAKGGQCKKGVSKPNISIYKIRTDVLGNQHIIKNEGDKPKLDF

SEQ ID NO: 273 - protein, 1127 aa, synthetic construct
MSDLVLGLDIGIGSVGVGILNKVTGEIIHKNSRIFPAAQAENNVERRTNRQGRRLTRRKKHRRVRLNHLFEESGLITDFTKVSINLNPYQLRVKGLTDELSNEELFIALKNMVKHRGISYLDDASDDGNSSVGDYAQIVKENSKQLETKTPGQIQLERYQKYGQLRGDFTVEEDGKKHRLINVFPTSAYRAEALRILQTQQEFNPQITDEFINSYLQILTGKRKYYHGPGNEKSRTDYGRYTTKKDSEDEYITLDNIFGILIGKCTFYPEEYRAAKASYTAQEFNLLNDLNNLTVPTETKKLSEEQKNQIITYVKNEKAMGPAKLFKYIAKLLSCDVADIKGYRIDKSDKAEIHTFEAYRKMKTLETIDIEQMERENLDKLAYVLTLNTEKEGIQEALEHEFADGTFSQEQIDELVQFRKANSSIFGKGWHSFSVKLMMELIPELYATSEEQMTILTRLGKQKTTSSSNKTKYIDEKQLTEEIYNPVVAKSVRQAIKIVNAAIKEYGDFDNIVIEMARETNEDDEKKAIQKIQKANKDEKDAAMLKAANQYNGKAELPHSVFHGHKQLATKIRLWHQQGERCLYTGKTISIHDLINNPNQFEIDHILPLSITFDDSLANKVLVYATANQEKGQRTPYQALDSMDDAWSFRELKAFVRESKALSNKKKEYLLTEEDISKFDVRKKFIERNLVDTRYASRVVLNALQEHFRVHKTDTKVSVVRGQFTSQLRRHWGIEKTRDTYHHHAVDALIIAASSQLNLWKKQKNTLVSYSEDQLLDIETGELISDDEYKESVFKAPYQHFVDTLKSKEFEDSILFSYQVDSKFNRKISDATIYATRQAKVGKDKKDETYVLGKIKDIYSQTGYDAFIKIYKKDKSKFLMYRHDPQTFEKVIEPILENYPNKEMNEKGKEVPCNPFLKYKEEHGYIRKYSKKGNGPEIKSLKYYDSKLGNHIDITPKNSNNKVVLQSVSPWRADVYFNKTTGKYEILGLKYADLQFEKGTGTYKISEEKYNDIKKKEGVDSDSEFKFTLYKNDLLLIKDTETKEQQLFRFLSRTMPNVKHYVELKPYDKQKFEDNEELIKILGIVAKGGQCKKGLSKPNISIYKVRTDVLGNQHIIKNEGDKPKLDF

SEQ ID NO: 274 - protein, 1127 aa, synthetic construct
MSDLVLGLDIGIGSVGVGILNKVTGEIIHKNSRIFPAAQAENNVERRTNRQGRRLTRRKKHRRVRLNHLFEESGLITDFTKVSINLNPYQLRVKGLTDELSNEELFIALKNMVKHRGISYLDDASDDGNSSVGDYAQIVKENSKQLETKTPGQIQLERYQKYGQLRGDFTVEEDGKKHRLINVFPTSAYRAEALRILQTQQEFNPQITDEFINSYLQILTGKRKYYHGPGNEKSRTDYGRYTTKKDSEDEYITLDNIFGILIGKCTFYPEEYRAAKASYTAQEFNLLNDLNNLTVPTETKKLSEEQKNQIITYVKNEKAMGPAKLFKYIAKLLSCDVADIKGYRIDKSDKAEIHTFEAYRKMKTLETIDVEQMERENLDKLAYVLTLNTEKEGIQEALEHEFADGTFSQEQIDELVQFRKANSSIFGKGWHNFSVKLMMELIPELYATSEEQMTILTRLGKQKTTSSSNKTKYIDEKQLTEEIYNPVVAKSVRQAIKIVNAAIKEYGDFDNIVIEMARETNEDDEKKAIQKIQKANKDEKDAAMLKAANQYNGKAELPHSVFHGHKQLATKIRLWHQQGERCLYTGKTISIHDLINNPNQFEIDHILPLSITFDDSLANKVLVYATANQEKGQRTPYQALDSMDDAWSFRELKAFVRESKALSNKKKEYLLTEEDISKFDVRKKFIERNLVDTRYASRVVLNALQEHFRAHKTDTKVSVVRGQFTSQLRRHWGIEKTRDTYHHHAVDALIIAASSQLNLWKKQKNTLVSYSEDQLLDIETGELISDDEYKESVFKAPYQHFVDTLKSKEFEDSILFSYQVDSKFNRKISDATIYATRQAKVGKDKKDETYVLGKIKDIYSQTGYDAFIKIYKKDKSKFLMYRHDPQTFEKVIEPILENYPNKEMNEKGKEVPCNPFLKYKEEHGYIRKYSKKGNGPEIKSLKYYDSKLGNHIDITPKNSNNKVVLQSVSPWRADVYFNKTTGKYEILGLKYADLQFEKGTGTYKISQEKYNDIKKKEGVDSDSEFKFTLYKNDLLLIKDTETKEQQLFRFLSRTMPNKKHYVELKPYDKQKFEGNEELIKILGIVAKGGQCKKGLSKPNISIYKVRTDVLGNQHIIKNEGDKPKLDF

SEQ ID NO: 275 - protein, 1128 aa, synthetic construct
MSDLVLGLDIGIGSVGVGILNKVTGEIIHKNSRIFPAAQAENNVERRTNRQGRRLTRRKKHRRVRLNHLFEESGLITDFTKVSINLNPYQLRVKGLIDELSNEELFIALKNMVKHRGISYLDDASDDGNSSVGDYAQIVKENSKQLETKTPGQIQLERYQKYGQLRGDFTVEEDGKKHRLINVFPTSAYRSEALRILQTQKEFNPQITDEFINRYLEILTGKRKYYHGPGNEKSRTDYGRYTTKKDSENEYITLDNIFGILIGKCTFYPEEYRAAKASYTAQEFNLLNDLNNLTVPTETKKLSEEQKNQIINYVKNEKAMGPAKLFKYIAKLLSCDVADIKGYRIDKSDKAEIHTFEAYRKMKTLETIDFEKMSRDQLDKLAYVLTLNTEREGIQEALDHEFADGNFSQEQIDELVQFRKANSSIFGKGWHNFSVKLMMELIPELYATSEEQMTILTRLGKQKTTSSSNKTKYIDEKLLTEEIYNPVVAKSVRQAIKIVNAAIKEYGDFDNIVIEMARETNEDDEKKAIQKIQKANKDEKDAAMLKAANQYNGRAELPHSVFHGHKQLATKIRLWHQQGERCLYTGKTISIHDLINNPNQFEIDHILPLSITFDDSLANKVLVYATANQEKGQRTPYQALDSMDDAWSFRELKAFVRESKSLSNKKKEYLLTEEDISRFDVRKKFIERNLVDTRYASRVVLNALQEHFRAHKTDTKVSVVRGQFTSQLRRHWGIEKTRDTYHHHAVDALIIAASSQLNLWKKQKNTLVNYSENQLLDIETGELISDDEYKESVFKAPYQHFVDTLKSKEFEDSILFSYQVDSKFNRKISDATIYATRQAKVGKDKKDETYVLGKIKDIYSQTGYDAFIKIYQKDKSKFLMYRHDPQTFEKVIEPILENYPNKEMNEKGKEVPCNPFLKYKEEHGDYIRKYSKKGNGPEIKSLKYYDSKLGNHIDITPKDSNNKVVLQSVSPWRADVYFNKTTGKYEILGLKYADLQFEKGTGTYKISQEKYNVIKKKEGVDSDSEFKFTLYKNDLLLIKDTETKEQQLFRFLSRTKPNVKHYVELKPYDKQKFEGNESLINVLGAVAKGGQCQKGINKPNISIYKVRTDVLGNQHIIKNEGDKPKLDF

SEQ ID NO: 276 - protein, 1127 aa, synthetic construct; identical to SEQ ID NO: 272

SEQ ID NO: 277 - protein, 1128 aa, synthetic construct
MSDLVLGLDIGIGSVGVGILNKVTGEIVHKNARIFPAAQAENNVERRTNRQGRRLTRRKKHRRVRLNHIFEESGLITDFTKVSINLNPYQLRVKGLTDELSNEELFIALKNMVKHRGISYLDDASDDGNSSVGDYAQIVKENSKQLETKTPGQIQLERYQKYGQLRGDFTIEEDGKKHRLINVFPTSAYRAEALRILQTQQEFNPQITDEFINSYLQILTGKRKYYHGPGNEKSRTDYGRYTTKKDSEDEYITLDNIFGILIGKCTFYPEEYRAAKASYTAQEFNLLNDLNNLTVPTETKKLSEEQKNQIITYVKNEKAMGPAKLFKYIAKLLACDVADIKGYRIDKSDKPEIHTFEAYRKMKTLETIDVEQMEREKLDKLAYVLTLNTEREGIQEAIEHEFSDGTFSQEQVDELVQFRKSNSSIFGKGWHNFSVKLMMELIPELYATSEEQMTILTRLGKQKRTSSSNKTKYIDEKRLTEEIYNPVVAKSVRQAIKIVNAAIKEYGDFDNIVIEMAREMNEDDEKKAIKKIQEANKSEKDAAMRKAANQYNGKAELPHSVFHGHKQLATKIRLWHQQGERCLYTGKTISIHDLINNPNQFEIDHILPLSITFDDSLANKVLVYATANQEKGQRTPYQALDSMDDAWSFRELKAFVRESKTLSNKKKEYLLTEEDISKFDVRKKFIERNLVDTRYASRVVLNALQEHFRARKIDTKVSVVRGQFTSQLRRHWGIDKTRDTYHHHAVDALIIAASSQLNLWKKQKNTLVSYSEDQLLDIETGELISDDEYKESVFKAPYQHFVDTLKSKEFEDSILFSYQVDSKFNRKISDATIYATRQAKVGKDKKDETYVLGKIKDIYSQAGYDAFIKIYQKDKSKFLMYRHDPQTFEKVIEPILENYPNKEMNEKGKEVPCNPFLKYKEEHGDYIRKYSKKGNGPEIKSLKYYDSKLGNHIDITPKNSNNKVVLQSVSPWRADVYFNKTTGKYEILGLKYADLQFEKGTGTYKISQEKYNDIKKKEGVDSDSEFKFTLYKNDLLLIKDTETKEQQLFRFLSRSMPNKKHYVELKPYSKDKFEKNETLIEILGPTDKSGRCIKGLAKSNLSIFKVRTDILGNQHIIKNEGDKPKLDF

SEQ ID NO: 278 - protein, 1122 aa, synthetic construct
MSDLVLGLDIGIGSVGVGILNKVTGEIIHKNSRIFPAAQAENNVERRTNRQGRRLTRRKKHRRVRLNHLFEESGLITDFTKVSINLNPYQLRVKGLIDELSNEELFIALKNMVKHRGISYLDDASDDGNSSVGDYAQIVKENSKQLETKTPGQIQLERYQKYGQLRGDFTVEEDGKKHRLINVFPTSAYRAEALRILQTQQEFNSQITDEFINRYLEILTGKRKYYHGPGNEKSRTDYGRYRTSGETLDNIFGILIGKCTFYPEEFRAAKASYTAQEFNLLNDLNNLTVPTETKKLSEEQKNQIINYVKNEKAMGPAKLFKYIAKLLSCDIADIKGYRIDKSDKAEIHTFEAYRKMKTLETIDIEKMSREELDKLAYVLTLNTEREGIQEALEHEFVDGNFSQEQIDELVQFRKANSSIFGKGWHNFSVKLMMELIPELYATSEEQMTILTRLGKQKTTSSSNKTKYIDEKLLTEEIYNPVVAKSVRQAIKIVNAAIKEYGDFDNIVIEMARATNEDDEKKAIQKIQKANKDEKDAAMLKAANQYNGKAELPHSVFHGHKQLATKIRLWHQQGERCLYTGKTISIHDLINNPNQFEIDHILPLSITFDDSLANKVLVYATANQEKGQRTPYQALDSMDDAWSFRELKAFVRESKTLSNKKKEYLLTEEDISKFDVRKKFIERNLVDTRYASRVVLNALQEHFRAHKIDTKVSVVRGQFTSQLRRHWGIEKTRDTYHHHAVDALIIAASSQLNLWKKQKNTLVNYSENQLLDIETGELISDDEYKESVFKAPYQHFVDTLKSKEFEDSILFSYQVDSKFNRKISDATIYATRQAKVGKDKKDETYVLGKIKDIYSQTGYDAFIKIYQKDKSKFLMYRHDPQTFEKVIEPILENYPNKEMNEKGKEVPCNPFLKYKEEHGDYIRKYSKKGNGPEIKSLKYYDSKLGNHIDITPKDSNNKVVLQSVSPWRADVYFNKTTGKYEILGLKYADLQFEKGTGTYKISQEKYNVIKKKEGVDSDSEFKFTLYKNDLLLIKDTETKEQQLFRFLSRTKPNVKHYVELKPYDKQKFEGNESLINVLGAVAKGGQCQKGINKPNISIYKVRTDVLGNQHIIKNEGDKPKLDF

SEQ ID NO: 279 - protein, 1139 aa, synthetic construct
MSDLVLGLDIGIGSVGVGILNKVTGEIIHKNSRIFPAAQAKNNVERRINRQGRRLTRRKKHRRVRLNHLFEESGLITDFTNVSINLNPYQLRVKGLTDELSNEELFIALKNMVKHRGISYLDDASDDGNSSVGDYAQIVKENSKQLETKTPGQIQLERYQKYGQLRGDFTVEEDGKKHRLINVFPTSAYRAEALRILQTQQEFNPQITDEFINSYLQILTGKRKYYHGPGNEKSRTDYGRYTTKKDSEDEYITLDNIFGILIGKCTFYPEEYRAAKASYTAQEFNLLNDLNNLTVPTETKKLSEEQKNQIITNVKNEKAMGPAKLFKYIAKLLSCDVADIKGYRIDKSDKAEIHTFEAYRKMKTLATIDIEQMERENLDKLAYVLTLNTEKEGIQEALEHEFADGTFSQEQIDELVQFRKANSSIFGKGWHSFSVKLMMELIPELYATSEEQMTILTRLGKQKTTSSSNKTKYIDEKQLTEEIYNPVAAKSVRQAIKIVNAAIKEYGDFDNIVIEMARETNEDDEKKAIQKIQKANKDEKDAAMLKAANQYNGKAELPHSVFHGHKQLATKIRLWHQQGERCLYTGKTISIHDLINNSNQFEIDHILPLSITFDDSLANKVLVYATANQEKGQRTPYQALDSMDDAWSFRELKAFVRESKALLNKKKEYLLTEEDISKFDVRKKFIERNLVDTRYASRVVLNALQEHFRSRKIDTKVSVVRGQFTSQLRRHWGIDKTRDTYHHHAVDALIIAASSQLNLWKKQKNTLVSYSEDQLLDIETGELISDDEYKESVFKAPYQHFVETLKSKEFEDSILFSYQVDSKFNRKISDATIYATRQAKVGKDKKDETYVLGKIKDIYSQTGYDAFIKIYKKDKSKFLMYRHDPQTFEKVIEPILENYPNKELNEKGKEVPCNPFLKYKEDHGYIRKYSKKGNGPEIKSLKYYDSKLGNHIDITPKNSNNKVVLQSVSPWRADVYFNKTTGKYEILGLKYADLKFEKGTGTYKISEEKYNDIKIKEGVDSDSEFKFTLYKNDLLLIKDTETKEQQLFRFLSRTMPNVKHYVELKPYDKQKFDDNEELIKILGIVAKGGQCKKGVSKPNISIYKIRTDVLGNQHIIKNEGDKPKLDFYKKCCNYSYHIL

SEQ ID NO: 280 - protein, 1128 aa, synthetic construct
MSDLVLGLDIGIGSVGVGILNKVTGEIIHKNSRIFPAAQAENNVERRTNRQGRRLTRRKKHRRVRLNHLFEESGLITDFTKVSINLNPYQLRVKGLIDELSNEELFIALKNMVKHRGISYLDDASDDGNSSVGDYAQIVKENSKQLETKTPGQIQLERYQKYGQLRGDFTVEEDGKKHRLINVFPTSAYRSEALRILQTQKEFNPQITDEFINRYLEILTGKRKYYHGPGNEKSRTDYGRYTTKKDSENEYITLDNIFGILIGKCTFYPEEYRAAKASYTAQEFNLLNDLNNLTVPTETKKLSEEQKNQIINYVKNEKAMGPAKLFKYIAKLLSCDVADIKGYRIDKSDKAEIHTFEAYRKMKTLETIDIEKMSRDQLDKLAYVLTLNTEREGIQEALEHEFADGNFSQEQIDELVQFRKANSSIFGKGWHNFSVKLMMELIPELYATSEEQMTILTRLGKQKTTSSSNKTKYIDEKLLTEEIYNPVVAKSVRQAIKIVNAAIKEYGDFDNIVIEMARETNEDDEKKAIQKIQKANKDEKDAAMLKAANQYNGRAELPHSVFHGHKQLATKIRLWHQQGERCLYTGKTISIHDLINNPNQFEIDHILPLSITFDDSLANKVLVYATANQEKGQRTPYQALDSMDDAWSFRELKAFVRESKSLSNKKKEYLLTEEDISRFDVRKKFIERNLVDTRYASRVVLNALQEHFRAHKTDTKVSVVRGQFTSQLRRHWGIEKTRDTYHHHAVDALIIAASSQLNLWKKQKNTLVNYSENQLLDIETGELISDDEYKESVFKAPYQHFVDTLKSKEFEDSILFSYQVDSKFNRKISDATIYATRQAKVGKDKKDETYVLGKIKDIYSQTGYDAFIKIYQKDKSKFLMYRHDPQTFEKVIEPILENYPNKEMNEKGKEVPCNPFLKYKEEHGDYIRKYSKKGNGPEIKSLKYYDSKLGNHIDITPKDSNNKVVLQSVSPWRADVYFNKTTGKYEILGLKYADLQFEKGTGTYKISQEKYNVIKKKEGVDSDSEFKFTLYKNDLLLIKDTETKEQQLFRFLSRTKPNVKHYVELKPYDKQKFEGNESLINVLGAVAKGGQCQKGINKPNISIYKVRTDVLGNQHIIKNEGDKPKLDF

SEQ ID NO: 281 - protein, 1121 aa, synthetic construct
MSDLVLGLDIGIGSVGVGILNKVTGEIIHKNSRIFPAAQAENNVVRRTNRQGRRLTRRKKHRRVRLNHLFEESGLITDFTKVSINLNPYQIRVKGLIDELSNEELFIALKNMVKHRGISYLDDASDDGNSSVGDYAQIVKENSKQLETKTPGQIQLERYQKYGQLRGDFTVEEDGKKHRLINVFPTSAYRAEALRILQTQQEFNPQITDEFINRYLEILTGKRKYYHGPGNEKSRTDYGRYRTSGETLDNIFGILIGKCTFYPEEFRAAKASYTAQEFNLLNDLNNLTVPTETKKLSEEQKNQIINYVKNEKAMGPAKLFKYIAKLLSCDVADIKGYRIDKSDKAEIHTFEAYRKMKTLETLDVKKMVREELDKLAYVLTLNTEKEGIQEAIEHEFADGTFNQEQVDELVQFRKANSSIFGKSWHNFSVKLMMELIPELYATSEEQMTILKRLGKQKTTSSSNKTKYIDEKQLTEEIYNPVVAKSVRQAIKIVNAAIKEYGDFDNIVIEMARETNEDDEKKAIQKIQKANKDEKDAAMLKAANQYNGKAELPHSVFHGHKQLATKIRLWHQQGERCLYTGKTISIHDLINNPNQFEIDHILPLSITFDDSLANKVLVYATANQEKGQRTPYQALDSMDDAWSFRELKAFVRDSKALSNKKKEYLLTEEDISKFDVRKKFIERNLVDTRYASRVVLNALQEHFRAHKTDTKVSVVRGQFTSQLRRHWGIEKTRDTYHHHAVDALIIAASSQLNLWKKQKNTLVSYSEDQLLDIETGELISDDEYKESVFKAPYQHFVDTLKSKEFEDSILFSYQVDSKFNRKISDATIYATRQAKVGKDKKDETYVLGKIKDIYSQTGYDAFIKIYKKDKSKFLMYRHDPQTFEKVIEPILENYPNKELNEKGKEVPCNPFLKYKEDHGYIRKYSKKGNGPEIKSLKYYDSKLGNHIDITPKNSNNKVVLQSVSPWRADVYFNKTTGKYEILGLKYADLKFEKGTGTYKISEEKYNDIKIKEGVDSDSEFKFTLYKNDLLLIKDTETKEQQLFRFLSRTMPNVKHYVELKPYDKQKFDDNEELIKILGIVAKGGQCKKGVSKPNISIYKIRTDVLGNQHIIKNEGDKPKLDF

SEQ ID NO: 282 - protein, 1122 aa, synthetic construct
MSDLVLGLDIGIGSVGVGILNKVTGEIIHKNSRIFPAAQAENNVERRTNRQGRRLTRRKKHRRVRLNHLFEESGLITDFTKVSINLNPYQLRVKGLIDELSNEELFIALKNMVKHRGISYLDDASDDGNSSVGDYAQIVKENSKQLETKTPGQIQLERYQKYGQLRGDFTVEEDGKKHRLINVFPTSAYRAEALRILQTQQEFNSQITDEFINRYLEILTGKRKYYHGPGNEKSRTDYGRYRTSGETLDNIFGILIGKCTFYPEEFRAAKASYTAQEFNLLNDLNNLTVPTETKKLSEEQKNQIINYVKNEKAMGPAKLFKYIAKLLSCDIADIKGYRIDKSDKAEIHTFEAYRKMKTLETIDIEKMSREELDKLAYVLTLNTEREGIQEALEHEFVDGNFSQEQIDELVQFRKANSSIFGKGWHNFSVKLMMELIPELYATSEEQMTILTRLGKQKTTSSSNKTKYIDEKLLTEEIYNPVVAKSVRQAIKIVNAAIKEYGDFDNIVIEMARATNEDDEKKAIQKIQKANKDEKDAAMLKAANQYNGKAELPHSVFHGHKQLATKIRLWHQQGERCLYTGKTISIHDLINNPNQFEIDHILPLSITFDDSLANKVLVYATANQEKGQRTPYQALDSMDDAWSFRELKAFVRESKTLSNKKKEYLLTEEDISKFDVRKKFIERNLVDTRYASRVILNALQEHFRAHKIDTKVSVVRGQFTSQLRRHWGIEKTRDTYHHHAVDALIIAASSQLNLWKKQKNTLVNYSENQLLDIETGELISDDEYKESVFKAPYQHFVDTLKSKEFEDSILFSYQVDSKFNRKISDATIYATRQAKVGKDKKDETYVLGKIKDIYSQTGYDAFIKIYQKDKSKFLMYRHDPQTFEKVIEPILENYPNKEMNEKGKEVPCNPFLKYKEEHGDYIRKYSKKGNGPEIKSLKYYDSKLGNHIDITPKDSNNKVVLQSVSPWRADVYFNKTTGKYEILGLKYADLQFEKGTGTYKISQEKYNVIKKKEGVDSDSEFKFTLYKNDLLLIKDTETKEQQLFRFLSRTKPNVKHYVELKPYDKQKFEGNESLINVLGAVAKGGQCQKGINKPNISIYKVRTDVLGNQHIIKNEGDKPKLDF

SEQ ID NO: 283 - protein, 1128 aa, synthetic construct; identical to SEQ ID NO: 271

SEQ ID NO: 284 - protein, 1122 aa, synthetic construct
MSNGKILGLDIGVASVGVGIIDANTGEVIHASSRIFPSANAANNAERRGFRGSRRLIRRKKHRIKRLDDLFKTYNIELDGGVSEDNPYILRVKGLSQELSIEELYIALKNILKRRGISYLDDAESDNEAGRSDYAKAVERNRQLLVSKTPGEIQLDRLEKYGQLRGNFTIIDEEGQSQQIINVFSTSDYVKEAERILECQRVYHDFISDVFYNQVIDLIKEKRKYYIGPGNKKSRTDYGIYRTDGTTLENLFGILIGKCTFYPEQYRSSKASYTSQEFNFLNDLNNLSVPTETKKLSLEQKEFLVEYAKNSTVLGAGKLLQQIAKLVDCKVEDIKGYRLDNKDKPELHTFEIYRAMKVLAPLVSIEEMSREQLDTLADILTLNTDFEGIKEALQNQLPNVFDDEQVKGLASFRKSKSQLFAKGWHNLSQKIMLELIPELYATSDEQMTILTRLGKFEKSNTTEQTPHINVDEIVGEIYNPVVAKSIRQTIKIINAAIKKWGEFEQIVIEMPRDRNEDEEKKRIADGQKANAKEKEDSIRRAAELYCSGKELPGNVYHGHNQLATKIRLWYQQGERCIYTGQPISIHDLIHNQSQYEIDHILPLSLTFDDSLSNKVLVLATANQEKGQRTPYHYLQSTATAWSYREFKDYVTKCKGIGKKKREYLTFEEDIDVFEVRSKFIQRNLVDTRYASKVILNSLQDYFRTAGKSTKVSVVRGQFTAQLRHKWGIEKTRDTYHHHAVDALIVAASSQLKLWNKQENPLILDYTEGRQVDLETGEILELTDDQYKELVYQPPYQGFVNTISSSAFDDEILFSYQVDSKVNRKISDATIYATRKAQLGKDKVEETYVLGKIKDIYTQAGYEAFLKRYNKDKASFLMYHKDPDTWEKVLEIVLRNYREFDEKGKEVGNPFERYYKENGYLKKYSRKGNGPAIKSLKYYDNKLGNHINITPTNSRNSVVLQSLKPWRTDVYFNPDTQKYEFLGIKYSDLSFEKGTGKYGISQEKYDSLKTIDGIAKNSVFKFTLYRQDLLFIRDVENNLGKLLRFSSKNDTSKHYVELKPYEKSKFTTEEVLIPVLGKVAKSGQCIKGLNKPNLSIYKVRTDILGFKHFIKQEGERPQLKFKK

SEQ ID NO: 285 - protein, 1122 aa, synthetic construct
MSNGKILGLDIGIASVGVGVIDAQTGEIIHASSRIFPSANAANNAERRTFRGSRRLIRRKKHRIKRLDDLFNDFHINLDGEMSTDNPYVLRVKGLSQKLTVEELYISIKNIMKRRGISYLDDAESDNEAGRSDYAKAIERNRQLLTSKTPGEIQLERLEKYGQLRGNFTIIDEEGQSQQIINVFSTSDYVKEVEKILDCQKMYHKFISDEFCDKLIELLREKRKYYVGPGNEKSRTDYGIYRTDGTTLENLFGILIGKCTFYPDQYRSSRASYTAQEFNFLNDLNNLTVPTETKKLSQEQKEFLVNYAKETSVLGAGKILQQIAKLADCKVEDIRGYRLDNKDKPELHTFETYRAMKGLVPLVDIGVLSREQLDILADILTLNTDFEGIREALKKQLPNVFDEKQVKGLASFRKSKSQLFAKGWHNLSQKIMLEVIPELYATSDEQMTILTRLGKFEKSSVAEYPSSINVDEITDEIYNPVVAKSIRQTIKIINASIKKWGEFDQIVIEMPRDRNEDEEKKRIADGQKANAKEKADSILRAAELYCAGKVLPDYVYNGHNQLATKIRLWYQQGERCIYTGQPISIHDLIHNQNQYEIDHILPLSLTFDDSLSNKVLVLATANQEKAQRTPYNYLKSATSAWSYREFKDYVNKRKGIGKKKCEYLTFEEDINGFEVRSKFIQRNLVDTRYASKVILNALQDYFKISGIQTKVSVVRGQFTSQLRHKWGIEKTRETYHHHAVDALIIAASSQLRLWKKQESPLVVDYQEGRQVDLETGEILELTDEQYKELVYQPPYQGFVNTISSSAFDNEILFSYQVDSKVNRKISDATIYATRNAQLGKDKTEGIYVLGKIKDIYTQAGYEAFLKRYTKDKTSFLMYHKDLDTWEKVIEIILRDYREYDEKGKEIGNPFERYRRENGYVKKYSRKGNGTAIKSLKYYDNKLGNHIDITPENSRNAVVLQSLKPWRTDVYFNKETGKYEFLGIKYSDLSFEKGTGEYGISQEKYDSIKIAEGVAKKSIFKFTLYKQDLLFIKDIENNFGKLLRFTSKNDTSKHYVELKPYDKNKFGTEEPLLPVLGNVAKSGQCIKGLNKSNISIYKVRTDILGYRHFIKQEGEHPQLKFKK

SEQ ID NO: 286 - protein, 1127 aa, synthetic construct
MSDLVLGLDIGIGSVGVGILNKVTGEIIHKNSRIFPAAQAENNVERRTNRQGRRLTRRKKHRRVRLNHLFEESGLITDFSKVSINLNPYQLRVKGLIDELSNEELFIALKNMVKHRGISYLDDASDDGNSSVGDYAQIIKENSKQLETKTPGQIQLERYQKYGQLRGDFTVEEDGKKHRLINVFPTSAYRAEALRILQTQQEFNPQITDEFINRYLEILTGKRKYYHGPGNEKSRTDYGRYTTKKDSEDEYITLDNIFGILIGKCTFYPEEYRAAKASYTAQEFNLLNDLNNLTVPTETKKLSEEQKNQIINYVKNEKAIGPAKLFKYIAKLLSCDVADIKGYRIDKSDKAEIHTFEAYRKMKTLETLDVKKMAREELDKLAYVLTLNTEKEGIQEAIEHEFADGTFSQEQVDELVQFRKANSSIFGKGWHNFSVKLMMELIPELYATSEEQMTILKRLGKQKTTSSSNKTKYIDERLLTEEIYNPVVAKSVRQAIKIVNAAIKEYGDFDNIVIEMARETNEDDEKKAIQKIQKANKDEKDAAMLKAANQYNGKAELPHSVFHGHKQLATKIRLWHQQGERCLYTGKTISIHDLINNPNQFEIDHILPLSITFDDSLANKVLVYATANQEKGQRTPYQALDSMDDAWSFRELKAFVRESKALSNKKKEYLLTEEDISKFDVRKKFIERNLVDTRYASRVVLNALQEHFRAHKTNTKVSVVRGQFTSQLRRHWGIEKTRDTYHHHAVDALIIAASSQLNLWKKQKNTLVSYSEDQLLDIETGELISDDEYKESVFKAPYQHFVDTLKSKEFEDSILFSYQVDSKFNRKISDATIYATRHAKVGKDKEDETYVLGKIKDIYSQTGYDAFIKIYQKDKSKFLMYRHDRQTFEKVIEPILENYPNKEMNEKGKEVPCNPFLKYKEEHGDYIRKYSKKGNGPEIKSLKYYDSKLGNHIDITPKDSNNKVVLQSLKPWRTDVYFNKNTGKYEILGLKYSDMKFEKGTGKYSISKEKYENIMVREGVDKSSEFKFTLYKNDLLLLKDSENGEQILLRFTSRNDTSKHYVELKPYNRQKFEGSEYLIKSLGTVAKGGQCIKGLGKDNLSIYKVRTDVLGNQHIIKNEGDKPKLDY

SEQ ID NO: 287 - protein, 1125 aa, synthetic construct
MTNGKILGLDIGIASVGVGIINAKTGNVEHASSRIFPAANADNNVERRSARGGRRLIRRKKHRLKRVEDLFEKYNIDTDFSNLNLNPYQLRVKGLNEQLSNEELFAILKNIAKRRGISYLDDAEDDSVGSSDYAKAIDENRKLLKKQTPGEIQLKRLEKYGQLRGNFTIQDENGEYHRLINVFSTSDYVKEARRILETQSYYNKFITESFVEDYIKILQGKRKYYVGPGNEKSRTDYGIYRTDGETLDNLFGILIGKCGFYPEEYRAAKASYTAQEYNFLNDLNNLTVPTETKKLSTEQKYQLVDFAKTASTLGAAKLLKEIAKLVGCQVEEIKGYRLDNKDKPDLHTFEPFRKLKSNLTTIAVENLSITTLDTLAHILTLNTEREGIEEAIQKELPNIFSDEQITEIIAVRKKNSQIFGKGWHSFSIKLMKELIPELYETSEEQMTILTRLKKVKTNSKITNRTKYINEEEITDEIYNPVVSKSIRQTVKIINATIKKYGAFDQIIIEMPRESNEEDERKFIADLQKSNAKEKDDAMKQAALLYNGKDELPHDVFHGHKELATKIRLWYQQGERCLYSGKHIDIHDLIHNQHMFEIDHVLPLSLSFDDSLANKVLVYSWANQEKGQRTPFQALPQMASAWSFRELRDYISKQKGISKKKRDYLLTEQDINKVEVKQKFIERNLVDTRYVSRVVLNTLQDALKVMNKETKISVIRGQFTSQLRRQWRIDKSRETYHHHAVDALIIAASSQLRLWKKQNNPMFAEDKHGQKINLDTGEVLSDDAYKELVYQAPYQGFVNTISSKSFEDEILFSYQVDSKVNRKISDATIYATRQAQLGKDKKEETYVLGKIKDIYSQAGYDAFRKKYDKDKAVFLMYQKDPETWEKVIEVILRDYKELDDKGKEIGNPFERYKVKHGFVRKYSRKNKGTEIKSLKYYDNKLGNHIDITPNNSKHSVVLQSINPWRADLYFNPETTKYELMGLKYADLSFEKGTGKYSISREKYDEIKEREGISSKSEFKFTLYKNDLILVKDIGNHKELIARFNSKNDTSKHYVELKPWNKAKFDSEEELIPAFGKVAKSGQFIKGLNKPDLSIYKVKTDILGHKYYIKKEGDKPKLNFENKIKNK

SEQ ID NO: 288 - protein, 1125 aa, synthetic construct
MNGLVLGLDIGIASVGVGILNKETGEIIHVNSRIFPAATADSNVERRGFRQGRRLGRRKKHRSARLNDLFEEFGFITDFSAVPLNLNPYALRVKGLSEELTNEELFIALKNIIKRRGISYLDDASEDGETASNEYGKAVEENRKLLADKTPGQIQLERFEKYGQVRGDFTVVENGENHRLINVFSTSAYKKEAERILRRQQEFNVRISDEFIEAYLTILTGKRKYYHGPGNEKSRTDYGRFRTDGTTLDNIFGILIGKCTFYPDEYRAAKASYTAQEFNLLNDLNNLTVPTETKKLRPEQKRQIVEYARTAKTLGTPTLLKYIAKLVDGSIDDIKGYRIDKSDKPEMHTFDAYRKMRTLELVDVDILSRETLDDLAYILTLNTESEGILEALNSKMPGTFTKEQIDELIQFRKKNSAVFGKGWHNFSLKLMNELIPELYETSEEQMTILTRLGKQRSREISKRTKYIDEKELTDEIYNPVVAKSVRQAIKIINLATKKYGIFDNIVIEMARESNEDDEKKAIQNVQKANEDEKKAAMEKAADLYNGKKELPDSIFHGHKELATKIRLWHQQGERCLYTGKNISIHDLIHNPHQYEIDHILPLSLSFDDGLANKVLVLATANQEKGQRTPFQALDSMDDAWSYIEFKQYVRNSKSLSNKKKDYLLTEEDISKIEVKQKFIERNLVDTRYSSRVVLNTLQEFYKTNDFDTKISVVRGQFTSQLRRKWKIEKSRDTYHHHAVDALIIAASSQLRLWKKQNNPLISYREGQLVDPETGEILSLTDDEYKELVLRPPYDYFVDTLKSKSFEDSILFSYQVDSKYNRKISDATIYGTRKAQLGKDKQEETYVLGKIKDIYSQKGYEDFIKRYKKDTTQFLMYHKDPQTFAKVIEEILKTYPDKELNEKGKEIPCNPFEKYRQENGPIRKYSKKGKGPEIKSLKYYDNKLGNHIDITPVNSQNQVVLQSLKPWRTDVYFNPQTSKYELMGLKYSDLRFEKGSGSYGISPEKYNKVKAKEGVDEDSEFKFTLYKNDLILIKDTETGEQQLFRYGSRNDTSKHYVELKPYEKAKFEGNQQLMNLLGTVAKGGQCLKGINKPNLSIYKVKTDVLGNKYFIKKEGDQPQLNFKKKI

SEQ ID NO: 289 - protein, 1129 aa, synthetic construct
MNGLVLGLDIGIASVGVGILEKNSGKIIHASSRLFPAATADNNVERRKNRQARRLHRRKKHRGVRLKDLFEYYGLLTDFSKVSINLNPYRLRVDGLDQQLTNEELFIALKNIVKRRGISYLDDASEDGGTVSSDYGKAVEENRKLLAEQAPGQIQLERFEKYGQVRGDFTVVENDEKLRLINVFSTSAYKKEAERILRKQQEFNNQITDEFIEDYLKILTGKRKYYHGPGNEKSRTDYGRFTTHKDSKGEYVTLDNIFGVLIGKCTFYPNEYRASKASYTAQEFNLLNDLNNLTVPTETKKLSEEQKKVIVEYAKEAKTLGASTLLKYIAKMIDTSVDQIRGYRVDVNNKPEMHTFEVYRKMQSLETISVGELSRNVLDELAHILTLNTEREGIEEAINTKLKDSFSQDQVLELVQFRKNNSGLFSKGWHNFSLKLIIELIPELYETSEEQMTILTRLGKQKSKETSKRSKYIDEKELTEEIYNPVVAKSVRQAIKIINEATKKYGIFDNIVIEMARENNEEDAKKDYIKRQKANQDEKNTAMEKAAFQYNGKKELPDSIFQGHKELATKIRLWHQQGEKCLYTGKNIPISDLIHNQYKYEIDHILPLSLSFDDSLSNKVLVLATANQEKGQRTPFQALDSMDDGWSYREFKSYVKESKLLGNKKKEYLLTEEDISKIEVKQKFIERNLVDTRYSSRVVLNALQDFYKAHKFDTTISVVRGQFTSQLRRKWGLEKSRETYHHHAVDALIIAASSQLRLWKKQNNPLISYKEGQFVDSETGEIISLSDDEYKELVFKAPYDHFVDTLRSKKFEDSILFSYQVDSKFNRKISDATIYATRKAKLDKDKSEETYVLGKIKDIYSQAGYDAFIKIYNKDKSKFLMYHKDPQTFEKVIEEILRTYPSKELNDKNKEIPCNPFEKYRQENGPIRKYSKKGNGPEIKSLKYYDKNIPESFINITPSNSKNKVILRQLNPWRTDVYFNHQTEKYELLGLKYADLQFEKKTGTYSITIDKYNEIKEKEGVGEQSEFKFTLYKNDLLLIKDTKNDEKQIFRFLSRTMPNVRHYVELKPYDKAKFDGNQSLITIFGNVAKGGQCLKGLNKSNISIFKVKTDVLGKKHIIKKEGDEPKLKF

SEQ ID NO: 290 - protein, 1130 aa, synthetic construct
MTNGKILGLDIGIASVGVGIIEAKTGKVVHANSRLFSAANAENNAERRGFRGSRRLNRRKKHRVKRVRDLFEKYGIVTDFRNLNLNPYELRVKGLTEQLTNEELFAALRTISKRRGISYLDDAEDDSTGSTDYAKSIDENRRLLKTKTPGQIQLERLEKYGQLRGNFTVYDENGEAHRLINVFSTSDYEKEARKILETQADYNKKITAEFIDDYVEILTQKRKYYHGPGNEKSRTDYGRFRTDGTTLENIFGILIGKCSFYPDEYRASKASYTAQEYNFLNDLNNLKVPTETGKLSTEQKEALVEFAKSTATLGPAKLLKEIAKILDCKVDEIKGYREDDKGKPDLHTFEPYRKLKFNLDSVNIDDLSREVLDKLAGILTLNTEREGIEDAIKRNLPNQFTEEQISEIINVRKSQSTAFNKGWHSFSAKLMNELIPELYATSDEQMTILTRLEKFKVKKKSSKNIKTIDEKEITDEIYNPVVAKSVRQTIKIINAAVKKYGDFDKIVIEMPRDKNADDEKKFINKRNKENKKEKDDALKRAAYLYNGTDKLPDEVFHGNKQLETKIRLWYQQGERCLYSGKPIPIQELVHNSNNFEIDHILPLSLSFDDSLANKVLVYSWTNQEKGQKTPYQVIDSMDAAWSFREMKEYVLKQKGLGKKKRDYLLTTENIDKIEVKKKFIERNLVDTRYASRVVLNSLQSALRELGKDTKVSVVRGQFTSQLRRKWKIDKSRETYHHHAVDALIIAASSQLKLWEKQDNPMFVDYGNNQVVDKQTGEILSVSDNEYKELVFQPPYQGFVNTISSKGFEDEILFSYQVDSKYNRKVSDATIYSTRKAKIGKDKKEETYVLGKIKDIYSQNGFDTFVKKYNKDKTQFLMYQKDPLTWENVIEVILGDYPTTKKSEDGKNDVKCNPFEEYRRENGLICKYSKKGKGTPIKSLKYYDKKLGNCIDITPEESRNKVILQSINPWRADVYFNPETLKYELMGLKYSDLSFEKGTGNYHISQEKYDAIKEKEGIGKKSEFKFTLYRNDLILIKDIASGEQEIYRFLSRTMPNVNHYVELKPYDKEKFDNVQELVEALGEADKVGRCIKGLNKPNISIYKVRTDVLGNKYFVKKEGDKPKLDFKNNKK

SEQ ID NO: 291 - protein, 1130 aa, synthetic construct
MTNGKILGLDIGVASVGVGIIEAKTGKVIHANSRLFSAANAENNAERRGFRGARRLTRRKKHRVKRVRDLFEKYDILTDFRNLNLNPYELRVKGLTEQLTNEELFAALRTIAKRRGISYLDDAEDDSTGSSDYAKSIDENRRLLKSMTPGQIQLERLEKYGQLRGNFTVYDENGEAHRLINVFSTSDYKNEARKILETQSNYNKQITDEFIEDYIEILTQKRKYYHGPGNEKSRTDYGRYRTDGTTLENIFGILIGKCTFYPDEYRASKASYTAQEYNFLNDLNNLKVPTETGKLSTEQKQYLVDFAKNSKALGAAKLLKEIAKIVECSVDDIKGCREDNKGKPDLHTFEPYRKLKFNLSFIDIDELSRETLDKLADILTLNTEREGIEDAIKRNLPNQFTEEQIVELVNVRRNQSSAFNKGWHSFSVKLMNELIPELYATSEEQMTILTRLEKFKATKKSSKNTKTIDEKEITDEIYNPVVAKSVRQTIKIINAAVKKYGNFDKIVIEMPRDKNADDEKKFIDKKNKENKKEKDDSLKRAAYLYNGTDKLPDDVFHGNKQLATKIRLWYQQGERCLYSGKPILIQDLVHNSNNFEIDHILPLSLSFDDSLANKVLVYAWTNQEKGQRTPYQVIDSMDAAWSFREMKDYVLKQKGIGKKKREYLLTTENIDKIEVKKKFIERNLVDTRYASRVVLNSLQTALKEFGKDTKVSVVRGQFTSQLRRKWKIDKSRETYHHHAVDALIIAASSQLKLWQKQENPMFVDYGENQVINKETGEILSVSDDDYKELVFQPPYQGFVNTISSKAFEDEILFSYQGDSKYNRKVSDATIYSTRKAKLSKDKKEETYVLGKIKDIYSQDGFDVFIKRYKKDKTQFLMYQKDPLTWENVIEVILRDYPSEKLSEDGKKNVKCNPFEEYRRENGLICKYSKKGKGTPIKSLKYYDKKLGNHISITPKESKNDVVLQSLNPWRADLYFNPDTLKYELMGLKYSDLSFEKGTGKYHISQEKYDEIKEKEDIGKKSEFKFTLYRNDLILIKDTESGEQEIYRFLSRTMPQKKHYVELKPYDKEKFNGGQELMQVFGNVANGGQCLKSLNKPNLSIYKVRTDVLGNKFFVKKEGDKPKLDFKNNKK

SEQ ID NO: 292 - protein, 1125 aa, synthetic construct
MSNGKILGLDIGIASVGVGIIEAQTGEVVHASSRIFPSANAANNAERRDFRKSRRLVRRKKHRIKRLEDLFATYQVELKGELSSENPYILRVKGLSQKLTVDELYVALKNIMKRRGISYLDDAEADSEAGQTDYAKAIERNRKLLDNKTPGEIQLDRLEKYGQLRGNFTIIDDEGQPQQIINVFSTSDYAKEVKQILECQKAYHTFISDDFCDNMLHLLTGKRKYYIGPGNEKSRTDYGVYRTDGTTLENLFGILIGKCTFYEDQYRSSKASYTAQEFNFLNDLNNLTVPTETKKLSQDQKECLVEYAKHTTTLGAKKVLQQVAKLVGCEVDDIKGYRLDNKDKPDMHTFEVFRAMKGLVPLVDIEDLSREQLDVLADILTLNTDFEGIQEALDRQLPDLFNHEQVKELASFRKAKSQLFARGWHSLSQKMMLELIPELYATSEEQMTILTRLGKFQKNDEEKGNTNTIKVDEVVEEIYNPVVAKSIRQTIKIINAATKKWGEFDQIVIEMPRDRNEDEEKKRIADGQKANAKEKVDSIKRAAELYCNGKELPDHLYHGHKQLATKIRLWYQQGERCIYTGQPISIHDLIHNQNQYEIDHILPLSLTFDDSLSNKVLVLATANQEKGQRTPYRYLQSTTAAWSYREFKDYVNKCRGLGKKKREYLIFEEDIDVFEVKSKFIQRNLVDTRYASRVILNALQDYYKTSGKSTKVSVVRGQFTSQLRRKWGIEKMRETYHHHAIDALIIAASSQLKLWKKQENPLLIDYQKGQQIDLETGEILELTDEQYKELVYQPPYQGFVRTISSPAFEDEILFSYQIDSKVNRKLSDATIYATRKAQLGKDKVEETYVLGKIKDIYTQAGYEAFSRRYHKDKTSFLMYQKDPDTWEKVIEIILRDYREFDDKGKEVGNPFERYYKENGYIKKYSRKGNGPAIKSLKYYDNKLGNHINITPENSRNAVVLQSLYPWRGDVYFNPESGKYELLGLKYSDLRYQKRTGDYGITQEQYNIIKVQEGISEESKFKFTLYKNDLLLVCDSSTKEKQLFRFLSRTLPNQKHYVELKPYDKAKFDAGQELLSIFGTVAKGGQCIKGLGKKNISIYKVRTDVLGFKYFIKQEGDQPQLNFKNK

SEQ ID NO: 293 - protein, 1122 aa, synthetic construct
MNGLVLGLDIGIASVGVGILEKNSGKIIHVNSRLFPAATADNNVERRKNRQARRLNRRKKHRGVRFQDLFEDYGLLTDFSKVSINLNPYRLRVDGLNQQLTNEELFIALKNIVKRRGISYLDDASEDGGTVSSDYGKAVEENRKLLAEQTPGQIQLERFEKYGQLRGDFTVEENGEKCRLINVFSTSAYKKEAERILRKQQEFNSKITDEFIEDYLKILTGKRKYYHGPGNEKSRTDYGRFRTDGTTLDNIFGVLIGKCTFYPEEYRASKASYTAQEFNLLNDLNNLTVPTETKKLSEEQKKTIIEYAKLAKTLGASTLLKYIAKMIDASVDQIRGYRVDLNNKPEMHTFEVYRKMQSLETISVGELSRNVLDELAHILTLNTEREGIEEAINSKLMGVFSQDQVLELVQFRKNNSSLFSKGWHNFSLKLMMELIPELYETSEEQMTILTRLGKQKSKETSKRTKYIDEKEVTEEIYNPVVAKSVRQAIKIINEATKKHGIFDNIVIEMARENNEEDAKKDYIKRQKANQDEKNAAMEKAAFQYNGKKELPDNIFHGHKELATKIRLWHQQGEKCLYTGKNIPISDLIHNQYKYEIDHILPLSLSFDDSLSNKVLVLATANQEKGQRTPFQALDSMDDGWSYREFKSYVKESKLLSNKKKEYLLTEEDISKIEVKQKFIERNLVDTRYSSRVVLNALQDFYKNHNFDTTISVVRGQFTSQLRRKWGLEKSRETYHHHAVDALIIAASSQLRLWKKQNNPLITYKEGQFVDSETGEIIPLADDEYKELVFKAPYDHFVDTLRSKTFEDSILFSYQVDSKYNRKISDATIYATRKAKLDKDKSEETYVLGKIKDIYSQAGYDAFIKIYNKDKSKFLMYHKDPQTFEKVIEEILRTYPSKELNDKNKEIPCNPFEKYRQENGPIRKYSKKGNGPEIKSLKYYDNKLGNHIDITPDGSDNQVVLQSIAPWRTDVYYNHKTGKYELLGLKYADLQFEKGSGAYSISIEKYLSIKDREGVDSQAEFKFTLYKNDLILIKDNQTNEEQFFRFLSRTMPNVKHYVELKPYDKAKFDGEQPLISLFGKVAKGGQCLKGLNKSNISIFKVKTDVLGKKHIIKKEGDEPKLKF

SEQ ID NO: 294 - protein, 1136 aa, synthetic construct
MNGLVLGLDIGIASVGVGILEKDTGKIIHASSRLFPAATADNNVERRSNRQGRRLNRRKKHRSVRLQDLFEGYGLLTDFSKVSMNLNPYQLRVQGMENQLTNEELFVALKNIVKRRGISYLDDASEDGGTVSSDYGKAVEENRKLLAEKTPGQIQLERFEKYGQLRGDFTVEENGEKHRLINVFSTSAYRKEAERILRKQQEFNSKITDEFIEDYLIILTGKRKYYHGPGNEKSRTDYGRFRTDGTTLDNIFGILIGKCTFYTEEYRASKASYTAQEFNLLNDLNNLTVPTETKKLSEEQKKLIIEYAKSAKTLGASTLLKYIAKMIDASVDQIRGYRVDVNNKPEMHTFEVYRKMQSLETIKVEELPRKVLDELAHILTLNTEREGIEEAINSKLKDIFNRDQVLELVQFRKNNSSLFSKGWHNFSIKLMMELIPELYETSEEQMTILTRLGKQRSKETSKRTKYIDEKELTEEIYNPVVAKSVRQAIKIINEATKKYGIFDNIVIEMARENNEEDAKKDYIKRQKANQDEKNAAMEKAAFQYNGKKELPDNIFHGHKELTTKIRLWHQQGEKCLYTGKNIPISDLIHNQYKYEIDHILPLSLSFDDSLSNKVLVLATANQEKGQRTPFQALDSMDDAWSYREFKSYVKDSKLLSNKKKDYLLTEEDISKIEVKQKFIERNLVDTRYSSRVVLNALQDFYKSHQLDTTISVVRGQFTSQLRRKWGIEKSRETYHHHAVDALIIAASSQLRLWKKHSNPLIAYKEGQFVDSETGEIVSLSDEEYKELVFKAPYDHFVDTLRSKKFEDSILFSYQVDSKYNRKISDATIYATRKAKLDKEKKEYTYTLGKIKDIYALGTKTPSKTGFYKFLDLYNKDKSQFLMFHKDRKTWDEVIEKIMEQYRPFKEYDKTGKLVDFNPFEKYRQDNGPIRKYSKKGNGPEIKSLKYYDILLGKHKNITPDGSRNTVALLSLNPWRTDVYYNSETKKYEFLGLKYADLCFEEGGAYGISEVKYKKIREKEGIGKNSEFKFTLYKNDLILIKDTETNCQQFFRFWSRTGKDNPKSFEKHKIELKPYEKAKFEKGEELKVLGKVPPSSNQFQKNMQIENLSIYKVKTDILGNKHFIKKEGDEPKLKFKK

SEQ ID NO: 295 - protein, 1121 aa, synthetic construct
MNGKILGLDIGVASVGVGIIDKESGEIIHASSRIFPAATADSNVERRGFRQGRRLGRRKKHRKVRLADLFRDAELVTDFSKVSINLNPYELRVKGLIEKLTNEELFIALKNIVKRRGISYLDDANEDGESSSSEYGKAVEENRKLLADKTPGQIQLERFEKYGQVRGDFTIEENGEKHRLLNVFSTSAYKKEAERILTKQQDYNQDITDEFIQAYLRILTGKRKYYHGPGNEKSRTDYGRFRTDGTTLDNIFGILIGKCTFYPEEYRAAKASYTAQEFNLLNDLNNLTVPTETKKLSEEQKRQIIEYAKGAKTLGAATLLKYIAKLIDASVDDIKGYRIDKSEKPEMHTFDIYRKMQTLETVDVEQLSREVLDKLAHILTLNTEREGIEEAIKVSFTKGEFEQNQIAELVSFRKSNSSLFGKGWHNFSIKLMMELIPELYETSEEQMTILTRLGKQKTKARSERTKYIDEKELTEEIYNPVVAKSVRQAIKIINLATKKYGIFDNIVIEMARENNEEDAKKDYVKRQKANEDEKNAAMEKAAHQYNGKKELPDSIFHGHKELATKIRLWHQQGEKCLYTGKNITIADLIENQYRYEIDHILPLSLSFDDSLANKVLVLATANQEKGQRTPFQALDGMDDSWSYRKFKSYVKVSKALSNKKKDYLLNEEDINKIEVKQKFIERNLVDTRYSSRVVLNALQDFYKLNDFDTKISVVRGQFTSQLRRKWRIDKSRETYHHHAVDALIIAASSQLRLWKKWNNPLISYKDNQFVDSETGEIITLTDDEYKELVFRAPYDHFVDMLGSKKFEDSILFSYQVDSKYNRKISDATIYATRKAKLGKDKSEETYVLGKIKDIYSQTGYDAFIKLYKKDKSKFLMYCKDPLTFEKVIEEILKTYPDKEQNENGKEVACNPFEKYRQENGPIRKYSKKGKGPEIKSLKYYDNKLGNHIDITPANSENQVILQSLSPWRTDVYFNPETEKYELLGLKYADLQFEKGTGNYSITLDKYYEIKEKEGVSEQSEFKFTLYKNDLLLIKDTKTKEQQMFRFLSRTMPNQKHYVELKPYDKGNFEGKEKIKVFVTTSNGRCLKGLGKADLSIYKVQTDVLGNKRFIKKEGDAPKLEF

SEQ ID NO: 296 - protein, 1122 aa, synthetic construct
MTNGMILGLDIGVASVGVGIIEADSGKVIHASSRIFPSANADNNVERRKFRGSRRLLRRKKHRVKRLQDLFDKYDIITNFDNLNLNPYELRVKGLNEPLSNEELFASLRNITKHRGISYLDDAEDDSSGNGTEYAKAIELNQQLLKEKTPGQIQFDRLNQYGQLRGNFDIVDENGEIHHVINVFSTSSYRKEAEQILKKQSETNTSISTDFINDFIQLLTSKRKYYHGPGNPKSRTDYGRYRTDGTDLDNIFDVLIGKCSFYPEEYRASKTSYTAQEFNFLNDLNNLTLPTETGKLSEQQKIDLVNWAKETKILGPKKLLQEIAKRNNCKYEDIRGYRLDKKDNPDMHVFDVYRKMNFDLETISVKDLSVDSLNQLARILTLNTEREGIEEAIKKLMPNQFTEKQMLELIAFRKSNSSIFGKGWHSLSIKLMKELIPELYHTSDEQMTILNRFGKFKLTKLDSKRTNYIDENFVTDEIYNPVVAKSVRQAIKLINASIKKWGDFDKIVIEMPRDKNEEEERKRIADGQKVNAKEKEQAEKHAAKLFNGKEELPSEVFHGYKELALRIRLWYQQDQKCLYSGKEITISDLIYNRELFEIDHILPLSLSFDDSLSNKVLVYRWANQEKGQRTPFQALDSMKSAWSYREFKNAILHNSKISRKKRDYFLTEQDISKIEVKQKFIERNLVDTRYASRTVLNVLQQSLKNLEKETKVSVVRGQFTSQLRRKWHIDKTRDTYHHHAVDALIIAASAKLRYWKKQGDILFENYLINRHVDRVTGEIQSDDRYKEEVFTPPYDGFVQTISNPGFEDEILFSYQVDSKVNRKISDATIYATRSAKLEKDKKEQTYVLGKIKDIYSQTGFENFLKIYNKDKSKFLIYQKDPETWEKIIEPILKNYREFDNKGKDIVNPFEKYRNDNGPICKYSRKGNGPEIKQFKYYDTVYKITSGLDISPRESRNKVILQSLNPWRTDFYFNPKTMKYELMGIRYVDLEFEKGTGDYLISDNLYKEIKKNEGISELSVFKFTLYKNDLLLIKDTENNEEQIFRFWSRNDLSSKNRVELKPYDRSRFSGNEILITKMGKAPKQCIKTLTYQNISIYKIKTDILGFKYYLKNEGNKPLLHFKK

SEQ ID NO: 297 - protein, 1127 aa, synthetic construct
MNGKILGLDIGVASVGVGILDKKTGEIIHASSRIFPAATADSNVERRGFRQGRRLGRRKKHRKVRLADLFSDAGLITDFLQVSINLNPYELRIKGLNEKLTNEELFIALKNIVKRRGISYLDDANEDGESSSSEYGKAVEENRKLLADKTPGQIQLERFEKYGQVRGDFTIEENGEKHRLLNVFSTSAYKKEAERILTKQQDYNKDITNEFIQTYLTILTGKRKYYHGPGNEKSRTDYGRFRTDGTTLDNIFGILIGKCTFYPEEYRAAKASYTAQEFNLLNDLNNLTVPTETKKLSEEQKRQIIEYAKGAKTLGAATLLKYIAKLVDGSVEDIKGYRIDKSEKPEMHTFDIYRKMQTLETVDVEKLSREVLDELAHILTLNTEREGIEEAIKVSFIKREFEQDQIAELVSFRKSNSSLFGKGWHNFSIKLMTELIPELYETSEEQMTILTRLGKQKTKARSKRTKYIDEKELTDEIYNPVVAKSVRQAIKIINLATKKYGVFDNIVIEMARETNEEDAKKDYVKHQKANEDEKNAAMEKAAHQYNGKKELPDNVFHGHKELATKIRLWHQQGEKCLYTGKNIPISDLIHNQYKYEIDHILPLSLSFDDSLANKVLVLATANQEKGQRTPFQALDSMDDAWSYREFKAYVRGARALSNKKKDYLLNEEDINKIEVKQKFIERNLVDTRYSSRVVLNALQDFYKLNDFDTKISVVRGQFTSQLRRKWRIDKSRETYHHHAVDALIIAASSQLRLWKKQGNPLISYKENQFVDSETGEIISLTDDEYKELVFRAPYDHFVDTVSSKKFEDRILFSYQVDSKYNRKISDATIYSTRKAKLGKDKSEETYVLGKIKDIYTQTGYDAFLKLYKKDKSKFLMYHKDPITFEKVIEEILKTYPDKEINEKGKEVACNPFEKYRQENGPIRKYSKKGKGPEIKSLKYYDNKLGNHIDITPDNSENQVILQSLSPWRTDVYFNTETEKYELMGLKYADLQFEKGTGNYSITPEKYYEIKEKEGVSEQSEFKFTLYKNDLLLIKDIKSHEQQIFRFLSRTMPNQKHYVELKPYDKAKFEGNQPLMALFGNVAKGGQCLKGLNKANISIYKVQTDVLGNKRFIKKEGDAPKLEFENNL

SEQ ID NO: 298 - protein, 1123 aa, synthetic construct
MNGLVLGLDIGIASVGVGILKKDTGEIIHANSRLFPAATADNNVERRTSRQARRLNRRKKHRSVRLHDLFEDFGLLTDFSKVSINLNPYQLRVQGLDDQLTNEELFIALKNIVKRRGISYLDDASEDGGTVSSDYGKAVEENRKLLAEQTPGQIQLDRFEKYGQLRGDFTVVENGEKRRLINVFSTSAYRKEAERILRKQQEFNNKITDEFIEDYLTILTGKRKYYHGPGNEKSRTDYGRFRTDGTTLDNIFGILIGKCTFYPDEYRASKASYTAQEFNLLNDLNNLTVPTEIKKLSEEQKKIIVEYAKTAKTLGASTLLKYISKLIGTSVDQIHGYRIDPDKKPEMHTFEVYRKMQSLETIRVEELPRNVIDELAHILTLNTEREGIEEAINAKLKDTFSQDQVLELVQFRKNNSSLFSKGWHNFSLKLMMELIPELYETSEEQMTILTRLGKQKSKDTSKRTKYIDEKELTEEIYNPVVAKSVRQAIKIINEATKKYGIFDNIVIEMARENNEEDAKKGYIKRQKANLDEKNAAMEKAAFQYNGKKELPDNIFHGHKELATKIRLWHQQGEKCLYTGKNIPISDLIQNQYKYEIDHILPLSLSFDDSLSNKVLVLATANQEKGQRTPFQALDSMDDAWSYHEFKTYVKDSKLLSNKKKDYLLTEEDISKIEVKQKFIERNLVDTRYSSRVVLNALQDFYKEHQFDTTISVVRGQFTSQLRRKWGLEKSRETYHHHAVDALIIAASSQLRLWKKQNNPLISYKNGQFVDQETGEIISLSDDEYKELVFKAPYDHFVDTLKSKKFEDSILFSYQVDSKFNRKISDATIYATRKAKLDKDKSEETYVLGKIKDIYSQAGYDAFIKIYNKDKSRFLMYHKDPQTFEKVIEEILRTYPSKELNDKNKEVPCNPFEKYRQENGPIRKYSRKGNGPEIKSLKYYDKNIPESFINITPSNSKNKVILRQLNPWRTDVYFNHQTEKYELLGLKYADLQFEKKTGNYSITIDKYNEIKEKEGVSKESEFKFTLYKNDLLLIKDTKNNEEQIFRFLSRTMPNQKNYVELKPYDKAKFDGNQELMTIFGNVAKGGQCMKGLNKSGISIFKVKTDVLGNKHFIKKEGEEPKLKF

SEQ ID NO: 299 - protein, 1123 aa, synthetic construct
MSNGKILGLDIGVASVGVGIIDAKTGNVIHANSRLFSAANAENNAERRGFRGARRLTRRKKHRVKRVRDLFEKYDISTDFRNLNLNPYELRVKGLTEQLTNEELFVALRTIAKRRGISYLDDAEDDSTGSSDYAKSIDENRRLLKTKTPGQIQLERLEKYGQLRGNFTVYDENGEAHRLINVFSTSDYKNEARKILETQSNYNKQITDEFIEDYIEILTQKRKYYHGPGNEKSRTDYGRFRTDGTTLENIFGILIGKCSFYPEEYRASKASYTAQEFNFLNDLNNLKVPTETGKLSTEQKEYLVDFAKKSKALGASKLLKEIAKIVDCSVDDIKGYRVDNKDKPDLHTFEPYRKLKFNLSSIDIDELSRETLDKLADILTLNTEREGIEDTIKRNLPSQFTEEQISEIVQIRKNQSSAFNKGWHSFSAKLMNELIPELYVTSEEQMTILTRLEKFKVNKKSSKNTKTIDEKEITDEIYNPVVAKSVRQTIKIINAAVKKYGDFDKIVIEMPRDKNAEDEKKFIDKKEKDDSLKRAAFLYNGTDNLPDGVFHGNKELKTKIRLWYQQGERCLYSGKLISIHDLVHNSNKFEIDHILPLSLSFDDSLANKVLVYAWTNQEKGQKTPYQVIDSMDAAWSFREMKDYVLKQKRLGKKKREYLLTTENIDKIEVKKKFIERNLVDTRYASRVVLNSLQTALKELGKDTKVSVVRGQFTSQLRRKWNIDKSRETYHHHAVDALIIAASSQLKLWQKQENPMFESYGENQVVNKETGEILSISDDKYKELVFQPPYQGFVNTISSKGFEDEILFSYQVDSKFNRKVSDATIYSTRKAKLGKDKKDETYVLGKIKDIYSQDGFDTFIKRYKKDKTQFLMYQKDPLTWENVIEVILRDYPSEKLSEDGKKTVKCNPFEEYRRENGLICKYSKKGNGTPIKSLKYYDKKLGNCIDITPEKSKNRVVLRQISPWRADIYFNLETLKYELMGLKYSDLSFEKGTGKYHISQEKYDAIREKEGIGKKSEFKFTLYRNDLILIKDTLNNCERMLRFGSKNDTSKHYVELKPLEKGTFDSEEEILPVLGKVAKSGQFIKGLNKPNISIYKVRTDVLGNKFFIKKEGDKPKLDFKNNNK

SEQ ID NO: 300 - protein, 1123 aa, synthetic construct
MNGLVLGLDIGIASVGVGILDKKTGKIIHANSRIFPAATADNNVERRKNRQSRRLNRRNKHRRERLNELFDEYGLLTDFSKVPINLNPYELRVKGLIEKLTNEELFIALKNIVKRRGISYLDDANEDGESSSSEYGKAVEENRKLLADKTPGQIQLERFEKYGQVRGDFTIEENGEKHRLLNVFSTSSYKKEAERILTKQQDYNQDITDEFIQAYLTILTGKRKYYHGPGNEKSRTDYGRFRTDGTTLDNIFGILIGKCTFYPEEYRASKASYTAQEFNLLNDLNNLIVPTETKKLSEEQKRQIIEYAKGAKTLGAATLLKYIAKMVDASVDDIKGYRIDKSEKPEMHTLDIYRKMQTLETVDVERLSREVLDELAHILTLNTEREGIEEAIKASFTKEEFEQDQIAELVSFRKSNSSLFGKGWHNFSIKLMMELIPELYETSEEQMTILTRLGKQKTKATSKRTKYIDEKELTEEIYNPVVAKSVRQAIKIINFATKKYGIFDNIVIEMARETNEEDAKKDYVKRQKANEDEKNAAMEKAAYQYNGKKELPDNVFHGHKELATKIRLWHQQGEKCLYTGKNVPISDLIHNQYKYEIDHILPLSLSFDDSLANKVLVLATANQEKGQRTPFQALDAMDDSWSYREFKSYVKDSKTLSNKKKDYLLNEEDINKIEVKQKFIERNLVDTRYSSRVVLNTLQDFYKLNEFDTKISVVRGQFTSQLRRKWRIDKSRETYHHHAVDALIIAVSSQLRLWKKQSNPLISYKDTKFVDSETGEIISLTDDEYKELVFRAPYDHFVDTVSSEKFEESILFSYQKDSKYNRKISDATIYATRKAKLGKDKSEETYVLGKIKDIYTQTGYDAFIKLYKKDKSKFLMYHKDPLTFEKVIEEILKTYPDKEQNEKGKEVACNPFEKYRQENGPIRKYSKKGKGPEIKSLKYYDNKLGNHIDITPDNSENQVILQSLSPWRTDVYFNPETGKYELLGLKYADLQFEKGTGNYSINSEKYYKIKEKEGVSEQSEFKFTLYKNDLILVRDTKTDEQQMFRFLSRTMPNQKHYVELKPYDKAKFEGNQPLMALLGNVAKGGQCLKGLNKANISIYKVQTDILGNKRFIKKEGDAPKLKF

SEQ ID NO: 301 - protein, 1130 aa, synthetic construct
MNGKILGLDIGVASVGVGILDKETGEISHASSRIFPAATADSNVERREFRQGRRLGRRKKHRKVRLADLFSDAGLITDFSQVSINLNPYELRVKGLNEKLTNEELFIALKNIVKRRGISYLDDANEDSESSSSDYGKAVEENYGKAVEENRKLLANKTPGQIQLERFEKYGQVRGDFTVEENGEKHRLLNVFSTSAYKKEAERILTKQQYYNQDITDEFIQAYLTILTGKRKYYHGPGNEKSRTDYGRFRTDGTTLDNIFGILIGKCTFYPEEYRAAKASYTAQEFNLLNDLNNLTVPTETKKLSEEQKRQIIEYAKGAKTLGAATLLKYIAKLIDASVDDIKGYRIDKSEKPEMHTFDIYRKMQTLETVDVEQLSREVLDELAHILTLNTEREGIEEAIKASFIKEEFEQDQIAELVLFRKSNSSLFGKGWHNFSIKLMIELIPELYETSEEQMTILTRLGKQKTKAKSKRTKYIDEKELTEEIYNPVVAKSVRQAIKIINLATKKYGIFDNIVIEMARENNEEEAKKDYVKRQKANEDEKNAAMEKAAHQYNGKKELPDSIFHGHKELATKIRLWHQQGEKCLYTGKNIPIADLIENQYKYEIDHILPLSLSFDDSLANKVLVLATANQEKGQRTPFQALDGMDDSWSYREFKSYVKASKALSNKKKDYLLNEEDINKIEVKQKFIERNLVDTRYSSRVVLNALQDFYKLNDFDTKISVVRGQFTSQLRRKWRIGKSRETYHHHTVDALIIAASSQLRLWKKRNNPLISYKDNQFVDSETGEIITLTDDEYKELVFRAPYDHFVDTLSSKKFEDSILFSYQVDSKYNRKISDATIYATRKAKLGKDKSEETYVLGKIKNIYTQTGYDAFIKLYKKDKSKFLMYQKDPLTFEKVIEEILKTYPDREQNENGKEVACNPFEKYRQENGPIRKYSKKGKGPEIKSLKYYDKNIPESFVNITPHNSKNKVILRQLNPWRTDVYFNPDTKKYELLGLKYADLQFEKGTGNYSITPEKYYEIKEKEGVSEQSEFKFTLYKNDLLLIKDTKSHEQQIFRFLSRTMPNQKHYVELKPYDKGNFEGKEKIKVFITTSNGRCLKGVGKENLSIYKVQTDVLGNKRFIKKEGDAPKLEF

SEQ ID NO: 302 - protein, 1126 aa, synthetic construct
MNGLVLGLDIGVASVGVGILDKKTGEIKHANSRIFPAATADSNVERRGFRQARRLSRRKKHRGKRLLDLFEEYQLLTDFSNLSLNLNPYQLRVKGMREKLTNEELFIVLKNIVKHRGISYLDDAAEDDNNSSSEYGKAVEENRKLLEDKTPGQIQLERFEKYGQIRGDFTIIDENGENHRLINVFSTSAYKKEAERILRKQQELNAAITDEFIESYIKVLTGKRKYYHGPGSEKSPTDYGLYRKINGKTEKIADNLFGILIGKCSFYPEEYRAPKASYTAQEYNLLNDLNNLTVPTETKKLSEEQKHQIVEYAKTEKTLGAKKLLQYIAKLTNGTFDDIKGYRIDKSDKPDIHTFEVYRKMQTIETIDVAILPRETMDELAHILTLNTEREGIEEAIKKEFLNQFSEQQILELVQFRKKNSSLFAKGWHSFSIKLMKELIPELYTTSEEQMTILTRLGKQKAKETSKRTKYIDEKELTGEIYNPVAAKAVRQAIKIINLATKKYGIFDHIVIEMARDKNEEDEKKEIQKRQKANEDEKSAAMKKAATLYNGKVELPDSIFHGHKELATKIRLWYQQEERCLYTGKKIDIQNLIHNQHMYEIDHILPLSLSFDDSLANKVLVLATANQEKGQRTPFQAIDTMDDAWSFREMKAYVNGLKNFSKKKKEYLLTEEDISKIEVKQRFIERNLVDTRYASRVVLNSLQDFYRQNDFDTKISVVRGQFTSQLRRKWKIDKTRDTYHHHAVDALIIAASSQLRLWKKQGNPLISYKDGQFVDPETGEILSLTNDEYKELVFQPPYEHFVETLKSKKFENSILFSYQVDSKYNRKISDATIYATRQAQLGKDKSEETYVLGKIKDIYSQSGYDDFIKRYHKDKTQFLMYHKDPVTFEKVIEKILEVYPDKELNEKNKEVPCNPFDKYRKENGPIRKYSKKGKGPEIKSLKYYDNKLGNHIDITPNNSQNRVVLQSLKPWRTDVYFNGQTGKYELLGLKYADLQFKQGGGYGLSLEKYKEIKCREGVAEHSEFKFTLHKNDLILIKDTESGEQQLFRFLSRTMPNQKHYVELKPYDKAKFEGDQKLMKIFGSVAKGGQCLKGLNKSNLSIYKVKTDVLGDKHFIKKEGEQAKLDF

SEQ ID NO: 303 - protein, 1128 aa, synthetic construct
MSDLVLGLDIGIGSVGVGILNKVTGEIIHKNSRIFPAAQAENNVERRTNRQGRRLTRRKKHRRVRLNHLFEESGLITDFTKVSINLNPYQLRVKGLIDELSNEELFIALKNMVKHRGISYLDDASDDGNSSVGDYAQIVKENSKQLETKTPGQIQLERYQKYGQLRGDFTVEEDGKKHRLINVFPTSAYRSEALRILQTQKEFNPQITDEFINRYLEILTGKRKYYHGPGNEKSRTDYGRYTTKKDSENEYITLDNIFGILIGKCTFYPEEYRAAKASYTAQEFNLLNDLNNLTVPTETKKLSEEQKNQIINYVKNEKAMGPAKLFKYIAKLLSCDVADIKGYRIDKSDKAEIHTFEAYRKMKTLETIDFEKMSRDQLDKLAYVLTLNTEREGIQEALEHEFADGNFIQEQIDELVQFRKANSSIFGKGWHNFSVKLMMELIPELYATSEEQMTILTRLGKQKTTSSSNKTKYIDEKLLTEEIYNPVVAKSVRQAIKIVNAAIKEYGDFDNIVIEMARETNEDDEKKAIQKIQKANKDEKDAAMLKAANQYNGRAELPHSVFHGHKQLATKIRLWHQQGERCLYTGKTISIHDLINNPNQFEIDHILPLSITFDDSLANKVLVYATANQEKGQRTPYQALDSMDDAWSFRELKAFVRESKSLSNKKKEYLLTEEDISRFDVRKKFIERNLVDTRYASRVVLNALQEHFRAHKTDTKVSVVRGQFTSQLRRHWGIEKTRDTYHHHAVDALIIAASSQLNLWKKQKNTLVNYSENQLLDIETGELISDDEYKESVFKAPYQHFVDTLKSKEFEDSILFSYQVDSKFNRKISDATIYATRQAKVGKDKKDETYVLGKIKDIYSQTGYDAFIKIYQKDKSKFLMYRHDPQTFEKVIEPILENYPNKEMNEKGKEVPCNPFLKYKEEHGDYIRKYSKKGNGPEIKSLKYYDSKLGNHIDITPKDSNNKVVLQSVSPWRADVYFNKTTGKYEILGLKYADLQFEKGTGTYKISQEKYNVIKKKEGVDSDSEFKFTLYKNDLLLIKDTETKEQQLFRFLSRTKPNVKHYVELKPYDKQKFEGNESLINVLGAVAKGGQCQKGINKPNISIYKVRTDVLGNQHIIKNEGDKPKLDF

SEQ ID NO: 304 - protein, 1122 aa, synthetic construct
MTNGMILGLDIGVASVGVGIIEADSGKIVHASSRIFPSANADNNVDRRKFRGSRRLLRRKKHRVKRLQDLFDKYDIVTNFDNLNLNPYELRVKGLNEPLSNEELFASLRNITKHRGISYLDDAEDDSSGNGTEYAKAIELNQQLLKEKTPGQIQFDRLNQYGQLRGNFDIVDENGEIHHVINVFSTSSYRKEAEQILKKQSETNTSISTDFINDFIQLLTSKRKYYHGPGNPKSRTDYGRYRTDGTDLDNIFDVLIGKCSFYPEEYRASKTSYTAQEFNFLNDLNNLTLPTETGKLSEQQKIDLVNWAKETKILGPKKLLQEIAKRNNCKYEDIRGYRLDNKDNPDMHVFDVYRKMNFDLETISVKDLSVDSLNQLARILTLNTEREGIEEAIKKLMPNQFTEKQMLELIAFRKSNSSIFGKGWHSLSIKLMKELIPELYHTSDEQMTILNRFGKFKLTKLDSKRTNYIDENFVTDEIYNPVVAKSVRQAIKLINASIKKWGDFDKIVIEMPRDKNEEEERKRIADGQKVNAKEKEQAEKHAAKLFNGKEELPSEVFHGYKELALRIRLWYQQDQKCLYSGKEITISDLIYNRELFEIDHILPLSLSFDDSLSNKVLVYRWANQEKGQRTPFQALDSMKSAWSYREFKNAILHNSKISRKKRDYFLTEQDISKIEVKQKFIERNLVDTRYASRTVLNVLQQSLKNLEKETKVSVVRGQFTSQLRRKWHIDKTRDTYHHHAVDALIIAASAKLRYWKKQGDILFENYLINRHVDRVTGEIQSDDSYKEEVFTPPYDGFVQTISNPGFEDEILFSYQVDSKVNRKISDATIYATRSAKLEKDKKEQTYVLGKIKDIYSQTGFENFLKIYNKDKTKFLIYQKDPETWEKIIEPILKNYREFDNKGKDIVNPFEKYRNDNGPICKYSRKGNGPEIKQFKYYDTVYKITSGLDISPRESRNKVILQSLNPWRTDFYFNPKTMKYELMGIRYVDLEFEKGTGDYLISDNLYKEIKKNEGISELSVFKFTLYKNDLLLIKDTENNEEQIFRFWSRNDLSSKNRVELKPYDRSRFSGNEILITKMGKAPKQCIKTLTYQNISIYKIKTDILGFKYYLKNEGNKPLLHFKK

SEQ ID NO: 305 - protein, 1123 aa, synthetic construct
MTRVNLGFDIGIASVGWSVLDNQTGKILETGVSIFSSGSASRNEERRSFRQSRRLIRRKKARICDMDHFLAKHGFPFPGNTGANPYEIRVKGLTEKLSREEVAIALHHLVKRRGISYDLKDVEDESASGTNYQESIAVNQRLLKKETPAEIQLARLTECGKVRGQVKSLGEDNTTTTLLNVFPNAAYQEEMVKLLKKQQEFYGEIDDPFMETAIGVLSRKREYFIGPGSEKSRTDYGIYRTDGTTLKNLFEILVGKDKIFPDQYRAAGNSYTAQLYNLLNDLNNLEVDATEDGKLTTAHKEQIIEELTTTTGNVNMLKLIAKVAGTSPAGIKKYRVDREGKPEFHSLAIYRRLRKKLGETGFEINEWPLEFFDDYGPIVTLNTESGELRKWLAEEGSRNYNFLTEPVVEAILANKSAFDSVGKNKWHRFSLKTMQLLIPELLHTSKEQMTILAEMGLLHENKKDYGDQNKVDVKYLTENLYNPVVRKSVKQAMDIFNALFEKYANIDYVVIEMPRDDAEDELEQKKQFQKFQLKNEKEKDDSLKEFQELAGISDLQLEAQLRKRKKLRQKIRMWYQQRGKCPYSGKTIAAVDLFHQDNQFEIDHIIPLSVSFDDGQNNKVLCYSEMNQEKAKQTPYAFMSRGGGQGFSALQAYVKSNNRLENAKKRNLLFTEDINDLEVRKRFIARNLVDTRYASRIVLNELQQFVRSKKLDTRVTVIRGKLTSKLRDRWRLNKSRETHHHHAVDAAVIAVSPMLKMWEKNAEIIPLKVDENTVDLKSGEIISDQEYAAQMYELPYARFLEQIPELHKKIKFHHQVDKKMNRKVSDATLYSTRKAKVGTDKKEQEYVIGKIKDIYQFDQYKKFKKLYDGDKSKFLMQRLDPQTFAKLEQIMEEYPGKIDATQPNGTIKLVDISPFELYRREHGPVTKYAKKNNGPAIKSLKFYDSIVGSSVKITPKNAKGKEVILKSLKPWRTDVYYNHEKEQYEIMGIKYADLKFKGDNYGITKARYQEIKEEEGVSEESEFLFSLYRGDRIQVSNGEDKIDLLFLSRSNPAKKGYVELKPIDRNQLNGKEVVSVYGAASGGRLKKQFVKKNHTLHKVNTDILGNPFYIKKEGDQPKNILDL

SEQ ID NO: 306 - protein, 1123 aa, synthetic construct
MTRVNLGFDIGIASVGWSVLDNQTGKILETGVSIFPSGSASRNEERRSFRQSRRLIRRKKARICDMDHLLKKNGFPFPGNTGANPYEIRVKGLTEKLSREELAIALHHLVKRRGISYDLKDVEDESASGTNYQESIAVNQRLLKKETPAEIQLARLTECGKVRGQVKSLGEDNTATTLLNVFPNAAYQEEMVKLLKKQQEFYGEIDDPFMETAIGILSRKREYFIGPGSEKSRTDYGIYRTDGTTLKNLFEILVGKDKIFPDQYRAAGNSYTAQLYNLLNDLNNLEVDATEDGKLTTAHKEQIIEELTTTTGNVNMLKLIAKVAGTSSAGIKKYRVDREGKPEFHSLAIYRRLRKKLGEAGFEINEWPPEFFDDYGPIVTLNTESGELRKWLAEEGSRKYDFLTEPVIEAILANKSAFDSVGKNKWHRFSLKTMQLLIPELLHTSKEQMTILAEMGLLHENKKDYGDQNKVDVKYLTENLYNPVVRKSVKQAMDIFNALFEKYANIDYVVIEMPRDDAEDEQEQKKQFQKFQLKNEKEKDDSLKEFQELAGVSDLQLEAQLRKRKKLRQKIRMWYQQRGKCPYSGKTIAAVDLFHQDNQFEIDHIIPLSVSFDDGQNNKVLCYSEMNQEKGKQTPYAFMSRGGGQGFSALQAYVKSNNRLENAKKRNLLFTEDINDLEVRKRFIARNLVDTSYASRIVLNELQQFVRSKKLDTRVTVIRGKLTSKLRDRWRLNKSRETHHHHAVDAAVIAVSPMLKMWEKNAEIIPLKVDENTVDLKSGEIITDQEYAAQMYELPYARFLEQMPELHKKIKFHHQVDKKMNRKVSDATLYSTRKAKVGTDKKEQEYVIGKIKDIYQFDQYKKFKKLYDGDKSKFLMQRLDPQTFAKLGKIMEDYPAKIDATQPNGTIKLVDISPFELYRREHGPVTKYAKKNNGPAIKSLKFYDSIVGSSVKITPKNAKGKEVILKSLKPWRTDVYYNHEKEQYEIMGIKYADLKFKGDNYGITKARYQEIKEEEGVSEESEFLFSLYRGDRIQVSNGEDKIDLLFLSRSNPAKKGYVELKPIDRNQLNGKEVVSVYGAASGGRLKKQFVKKNHTLHKVNTDILGNPFYIKKEGNQPKNILDL

SEQ ID NO: 307 - protein, 1123 aa, synthetic construct; identical to SEQ ID NO: 305

SEQ ID NO: 308 - protein, 1130 aa, synthetic construct
MSKVAKNMTRVNLGFDIGIASVGWSVLDNQTGKILETGVSIFPSGSASRNEERRSFRQSRRLIRRKKARICDMDHLLKKNGFPFPGNTGANPYEIRVKGLTEKLSREELAIALHHLVKRRGISYDLKDVEDESASGTNYQESIAVNQRLLKKETPAEIQLARLTECGKVRGQVKSLGEDNTATTLLNVFPNAAYQEEMVKLLKKQQEFYGEIDDPFMETAIGILSRKREYFIGPGSEKSRTDYGIYRTDGTTLKNLFEILVGKDKIFPDQYRAAGNSYTAQLYNLLNDLNNLEVDATEDGKLTTAHKEQIIEELTTTTGNVNMLKLIAKVAGTSSAGIKKYRVDREGKPEFHSLAIYRRLRKKLGEAGFEINEWPPEFFDDYGPIVTLNTESGELRKWLAEEGSRKYDFLTEPVIEAILANKSAFDSVGKNKWHRFSLKTMQLLIPELLHTSKEQMTILAEMGLLHENKKDYGDQNKVDVKYLTENLYNPVVRKSVKQAMDIFNALFEKYANIDYVVIEMPRDDAEDEQEQKKQFQKFQLKNEKEKDDSLKEFQELAGVSDLQLEAQLRKRKKLRQKIRMWYQQRGKCPYSGKTIAAVDLFHQDNQFEIDHIIPLSVSFDDGQNNKVLCYSEMNQEKGKQTPYAFMSRGGGQGFSALQAYVKSNNRLENAKKRNLLFTEDINDLEVRKRFIARNLVDTSYASRIVLNELQQFVRSKKLDTRVTVIRGKLTSKLRDRWRLNKSRETHHHHAVDAAVIAVSPMLKMWEKNAEIIPLKVDENTVDLKSGEIITDQEYAAQMYELPYARFLEQMPELHKKIKFHHQVDKKMNRKVSDATLYSTRKAKVGTDKKEQEYVIGKIKDIYQFDQYKKFKKLYDGDKSKFLMQRLDPQTFAKLGKIMEDYPAKIDATQPNGTIKLVDISPFELYRREHGPVTKYAKKNNGPAIKSLKFYDSIVGSSVKITPKNAKGKEVILKSLKPWRTDVYYNHEKEQYEIMGIKYADLKFKGDNYGITKARYQEIKEEEGVSEESEFLFSLYRGDRIQVSNGEDKIDLLFLSRSNPAKKGYVELKPIDRNQLNGKEVVSVYGAASGGRLKKQFVKKNHTLHKVNTDILGNPFYIKKEGNQPKNILDL

SEQ ID NO: 309 - protein, 1130 aa, synthetic construct
MSKVAKNMTRVNLGFDIGIASVGWSVLDNQTGKILETGVSIFSSGSASRNEERRSFRQSRRLIRRKKARICDMDHFLAKHGFPFPGNTGANPYEIRVKGLTEKLSREEVAIALHHLVKRRGISYDLKDVEDESASGTNYQESIAVNQRLLKKETPAEIQLARLTECGKVRGQVKSLGEDNTTTTLLNVFPNAAYQEEMVKLLKKQQEFYGEIDDPFMETAIGVLSRKREYFIGPGSEKSRTDYGIYRTDGTTLKNLFEILVGKDKIFPDQYRAAGNSYTAQLYNLLNDLNNLEVDATEDGKLTTAHKEQIIEELTTTTGNVNMLKLIAKVAGTSPAGIKKYRVDREGKPEFHSLAIYRRLRKKLGETGFEINEWPLEFFDDYGPIVTLNTESGELRKWLAEEGSRNYNFLTEPVVEAILANKSAFDSVGKNKWHRFSLKTMQLLIPELLHTSKEQMTILAEMGLLHENKKDYGDQNKVDVKYLTENLYNPVVRKSVKQAMDIFNALFEKYANIDYVVIEMPRDDAEDELEQKKQFQKFQLKNEKEKDDSLKEFQELAGISDLQLEAQLRKRKKLRQKIRMWYQQRGKCPYSGKTIAAVDLFHQDNQFEIDHIIPLSVSFDDGQNNKVLCYSEMNQEKAKQTPYAFMSRGGGQGFSALQAYVKSNNRLENAKKRNLLFTEDINDLEVRKRFIARNLVDTRYASRIVLNELQQFVRSKKLDTRVTVIRGKLTSKLRDRWRLNKSRETHHHHAVDAAVIAVSPMLKMWEKNAEIIPLKVDENTVDLKSGEIISDQEYAAQMYELPYARFLEQIPELHKKIKFHHQVDKKMNRKVSDATLYSTRKAKVGTDKKEQEYVIGKIKDIYQFDQYKKFKKLYDGDKSKFLMQRLDPQTFAKLEQIMEEYPGKIDATQPNGTIKLVDISPFELYRREHGPVTKYAKKNNGPAIKSLKFYDSIVGSSVKITPKNAKGKEVILKSLKPWRTDVYYNHEKEQYEIMGIKYADLKFKGDNYGITKARYQEIKEEEGVSEESEFLFSLYRGDRIQVSNGEDKIDLLFLSRSNPAKKGYVELKPIDRNQLNGKEVVSVYGAASGGRLKKQFVKKNHTLHKVNTDILGNPFYIKKEGDQPKNILDL

SEQ ID NO: 310 - protein, 1131 aa, synthetic construct
MSKVAKNMTRVNLGFDIGIASVGWSVLDNQTGKILETGISIFPSGSASRNEERRSFRQSRRLIRRKKARICDMDHFLAKYGFPFPGNTGANPYEIRVKGLTEKLSREELAIALHHLVKRRGISYDLKDVEDESASGTNYQESIAVNQRLLKKETPAEIQLARLTECGKVRGQVKSLGEDNTATTLLNVFPNAAYQEEMVKLLKKQQEFYGEIDDSFMETAIGILSRKREYFIGPGSEKSRTDYGIYRTDGTTLKNLFEILVGKDKIFPDQYRAAGNSYTAQLYNLLNDLNNLEVDATEDGKLTTAHKKQIIEELTTTTGNVNMLKLIAKVAGTSSAGIKKYRVDREGKPEFHSLAIYRRLRKKLGEAGFEINEWPPEFFDDYGPIVTLNTESGELRKWLAEEGSRKYDFLTEPVIEAILANKSAFDSVGKNKWHRFSLKTMQLLIPELLHTSKEQMTILAEMGLLHENKKDYGDQNKVDVKYLTENLYNPVVRKSVKQAMDIFNALFEKYANIDYVVIEMPRDDAEDELEQKKQFQKFQLKNEKEKDASLKEFQELAGVSDLQLEAQLRKRKKLRQKIRMWYQQRGKCPYSGKTIAAVDLFHQDNQFEIDHIIPLSVSFDDGQNNKVLCYSEMNQEKGKQTPYAFMSRGGGQGFSALQAYVKSNNRLENAKKRNLLFTEDINDLEVRKRFIARNLVDTRYASRIVLNELQQFVRSKKLDTLVTVIRGKLTSKLRDRWRLNKSRKTHHHHAVDAAVIAVSPMLKMWEKNAEIIPLKVDENTVDLKSGEIISDQEYAAQMYELPYARFLEQMPELHKKIKFHHQVDKKMNRKVSDATLYSTRKAKVGTDKKEQEYVIGKIKDIYQFDQYKKFKKLYDADKSKFLMQRLDPQTFAKLEQIMEDYPAKIDATQPNGTIKLVDISPFELYRREHGPVTKYAKKNNGPAIKSLKFYDSKVGSFIKITPENAKGKEVILQSLKPWRTDVYYNHEKQQYEIMGIKYADLRFKGDNYGITKARYQEIKEEEGVSEESEFLFSLYRGDRVQVSNGEEKIDLLFSSRTNPAIKGYVELKPINKSRFEGKEIVGFYGAVTPNGQFVKRFLPKGHVLLKVNTDILGNPFYIKKEGDQPKNILDL

SEQ ID NO: 311 - protein, 1130 aa, synthetic construct
MSKVAKNMTRVNLGFDIGIASVGWSVLDNQTGKILETGVSIFPSGSASRNEERRSFRQSRRLIRRKKARICDMDHLLKKNGFPFPGNTGANPYEIRVKGLTEKLSREELAIALHHLVKRRGISYDLKDVEDESASGTNYQESIAVNQRLLKKETPAEIQLARLTECGKVRGQVKSLGEDNTATTLLNVFPNAAYQEEMVKLLKKQQEFYGEIDDPFMETAIGILSRKREYFIGPGSEKSRTDYGIYRTDGTTLKNLFEILVGKDKIFPDQYRAAGNSYTAQLYNLLNDLNNLEVDATEDGKLTTAHKEQIIEELTTTTGNVNMLKLIAKVAGTSSAGIKKYRVDREGKPEFHSLAIYRRLRKKLGEAGFEINEWPPEFFDDYGPIVTLNTESGELRKWLAEEGSRKYDFLTEPVIEAILANKSAFDSVGKNKWHRFSLKTMQLLIPELLHTSKEQMTILAEMGLLHENKKDYGDQNKVDVKYLTENLYNPVVRKSVKQAMDIFNALFEKYANIDYVVIEMPRDDAEDEQEQKKQFQKFQLKNEKEKDDSLKEFQELAGVSDLQLEAQLRKRKKLRQKIRMWYQQRGKCPYSGKTIAAVDLFHQDNQFEIDHIIPLSVSFDDGQNNKVLCYSEMNQEKGKQTPYAFMSRGGGQGFSALQAYVKSNNRLENAKKRNLLFTEDINDLEVRKRFIARNLVDTRYASRIVLNELQQFVRSKKLDTRVTVIRGKLTSKLRDRWRLNKSRETHHHHAVDAAVIAVSPMLKMWEKNAEIIPLKVDENTVDLKSGEIITDQEYAAQMYELPYARFLEQMPELHKKIKFHHQVDKKMNRKVSDATLYSTRKAKVGTDKKEQEYVIGKIKDIYQFDQYKKFKKLYDGDKSKFLMQRLDPQTFAKLEKIMEDYPAKIDATQPNGTIKLVDISPFELYRREHGPVTKYAKKNNGPAIKSLKFYDSIVGSSVKITPKNAKGKEVILKSLKPWRTDVYYNHEKEQYEIMGIKYADLKFKGDNYGITKARYQEIKEEEGVSEESEFLFSLYRGDRIQVSNGEDKIDLLFLSRSNPAKKGYVELKPIDRNQLNGKEVVSVYGAASGGRLKKQFVKKNHTLHKVNTDILGNPFYIKKEGNQPKNILDL

SEQ ID NO: 312 - protein, 1130 aa, synthetic construct
MSKVAKNMTRVNLGFDIGIASVGWSVLDNQTGKILETGVSIFPSGSASRNEERRSFRQSRRLIRRKKARICDMDHFLAKHGFPFPGNTGANPYEIRVKGLTEKLSREEVAIALHHLVKRRGISYDLKDVEDESAGGTNYQESIAVNQRLLKKETPAEIQLARLTECGKVRGQVKSLGEDNTPTTLLNVFPNAAYQEEMVKLLKKQQEFYGEIDDSFMETAIGILSRKREYFIGPGSEKSRTDYGIYRTDGTTLKNLFEILVGKDKIFPDQYRAAGNSYTAQLYNLLNDLNNLEVDATEDGKLTTAHKKQIIEALTTTTGNVNMLKLIAKVAGTSPAGIKKYRVDREGKPEFHSLMIYRRLRKKLGENGIEINEWPPDFFDDYGPIVTLNTESGELRKWLAEEGSRNYNFLTEPVVEAILANKSAFDSVGKNKWHRFSLKTMQLLIPELLHTSKEQMTILAEMGLLHENKKDYGDQNKVDVKYLTENLYNPVVRKSVKQAMDIFNALFEKYANIDYVVIEMPRDDAEDEQEQKKQFQKFQLKNEKEKDASLKEFQELAGVSDLQLEAQLRKRKKLRQKIRMWYQQRGKCPYSGKTIAAVDLFHQDNQFEIDHIIPLSVSFDDGQNNKVLCYSEMNQEKGKQTPYAFMSRGGGQGFSALQAYVKSNNRLENAKKRNLLFTEDINDLEVRKRFIARNLVDTRYASRIVLNELQQFVRSKELDTRVTVIRGKLTSKLRDRWRLNKSRETHHHHAVDAAVIAVSPMLKMWEKNAEIIPLKVDENTVDLKSGEIITDQEYAAQMYELPYARFLEQMPELHKKIKFHHQVDKKMNRKVSDATLYSTRKAKVGTDKKEQEYVIGKIKDIYQFDQYKKFKKLYDADKSKFLMQRLDPQTFAKLEKIMEEYPAKIDAIQPNGTIKLVDISPFELYRREHGPVTKYAKKNNGPAIKSLKFYDSKVGSSIKITPENAKGKEVILQSLKPWRTDVYYNHEKQQYEIMGIKYADLRFKGDNYGITKARYQEIKEEEGVSEESEFLFSLYRGDRIQVSNGEDKIDLLFVSRTLPKQKGYVELKPIDRNQLNGKEVVSVYGAASGGRLKKQFVKKNHTLHKVNTDILGNPFYIKKEGNQPKNILDL

SEQ ID NO: 313 - protein, 1130 aa, synthetic construct
MGKVAKNMTRVNLGFDIGIASVGWSVLANQTGKILETGVSIFPSGSASRNEERRSFRQSRRLIRRKKARICDMDHFLAKQGFPFPGNTGANPYEIRVKGLTEKLSREELAIALHHLVKRRGISYDLKDVEDESAGGTNYQESIAVNQRLLKKETPAEIQLARLTECGKVRGQVKSLGEDNTATTLLNVFPNAAYQEEMVKLLKKQQEFYGEIDDSFMETAIGILSRKREYFIGPGSEKSRTDYGIYRTDGTTLKNLFEILVGKDKIFPDQYRAAGNSYTAQLYNLLNDLNNLEVDATEDGKLTTAHKEQIIEELTTTTGNVNMLKLIAKVAGTIPAGIKKYRVDREGKPEFHSLMIYRRLRKKLGEAGFEINEWPPEFFDDYGPIVTLNTENGELRKWLVEEGSRKYDFLTEPVIEAILANKPAFDSVGKNKWHRFSLKTMQLLIPELLHTSKEQMTILAEMGLLHENKKDYGNQNKVDVKYLTENLYNPVVRKSVKQAMDIFNALFEKYANIDYVVIEMPRDDAEDELEQKKQFQKFQLKNEKEKDDSLKEFQELAGVSDLQLEAQLRKRKKLRQKIRMWYQQRGKCPYSGKTIAAVDLFHQDNQFEIDHIIPLSVSFDDGQNNKVLCYSEMNQEKGKQTPYAFMSRGGGQGFSALQAYVKSNNRLENAKKRNLLFTEDINDLEVRKRFIARNLVDTRYASRIVLNELQQFVRSKKLDTRVTVIRGKLTSKLRDRWRLNKSRETHHHHAVDAAVIAVSPMLKMWEKNAEIIPLKVDENTVDLKSGEFITDQEYAAQMYELPYARFLEQMPELQKKIKFHHQVDKKMNRKVSDATLYSTRKAKVGTDKKEQDYVIGKIKDIYQFDQYKKFKKLYDADKSKFLMQRLDPQTFAKLEQIMEDYPAKIDATQPNGTIKLVDISPFELYRREHGPVTKYAKKNNGPAIKSLKFYDSIVGSSVKITPKNAKGKEVILKSLKPWRTDVYYNHEKEQYEIMGIKYADLKFKGDNYGITKARYQEIKEEEGVSEESEFLFSLYRGDRIQVSNGEDKIDLLFLSRSNPAKKGYVELKPIDRNQLNGKEVVSVYGAASGGRLKKQFVKKNHTLHKVNTDILGNPFYIKKEGNQPKNILDL

SEQ ID NO: 314 - protein, 1130 aa, synthetic construct
MSKVAKNMTRVNLGFDIGIASVGWSVLDNQTGKILETGVSIFPSGSASRNEERRSFRQSRRLIRRKKARICDMDHLLKKNGFPFPGNTGANPYEIRVKGLTEKLSREELAIALHHLVKRRGISYDLKDVEDESAGGTNYQESIAVNQRLLKKETPAEIQLARLTECGKVRGQVKSLGEDNTATTLLNVFPNAAYQEEMVKLLKKQQEFYGEIDDPFMETAIGILSRKREYFIGPGSEKSRTDYGIYRTDGTTLKNLFEILVGKDKIFPDQYRAAGNSYTAQLYNLLNDLNNLEVDATEDGKLTTAHKEQIIEELTTTTGNVNMLKLIAKVAGTSPAGIKKYRVDREGKPEFHSLAIYRRLRKKLGEAGFEINEWPPEFFDDYGPIVTLNTESGELRKWLAEEGSRKYDFLTEPVIEAILANKSAFDSVGKNKWHRFSLKTMQLLIPELLHTFKEQMTILAEMGLLHENKKDYGDQNKVDVKYLTENLYNPVVRKSVKQAMDIFNALFEKYANIDYVVIEMPRDDAEDELEQKKQFQKFQLKNEKEKDASLKEFQELAGVSDLQLEAQLRKRKKLRQKIRMWYQQRGKCPYSGKTIAAVDLFHQDNQFEIDHIIPLSVSFDDGQNNKVLCYSEMNQEKGKQTPYAFMSRGGGQGFSALQAYVKSNNRLENAKKRNLLFTEDINDLEVRKRFIARNLVDTRYASRIVLNELQQFVRSKELDTRVTVIRGKLTSKLRDRWRLNKSRETHHHHAVDAAVIAVSPMLKMWEKNAEIIPLKVDENTVDLKSGEIITDQEYAAQMYELPYARFLEQMPELHKKIKFHHQVDKKMNRKVSDATLYSTRKAKVGTDKKEQEYVIGKIKDIYQFDQYKKFKKLYDGDKSKFLMQRLDPQTFAKLEKIMEDYPAKIDATQPNGTIKLVDISPFELYRREHGPVTKYAKKNNGPAIKSLKFYDSIVGSSVKITPKNAKGKEVILKSLKPWRTDVYYNHEKEQYEIMGIKYADLKFKGDNYGITKARYQEIKEEEGVSEESEFLFSLYRGDRIQVSNGEDKIDLLFLSRSNPAKKGYVELKPIDRNQLNGKEVVSVYGAASGGRLKKQFVKKNHTLHKVNTDILGNPFYIKKESDQPKNILDL

SEQ ID NO: 315 - protein, 668 aa, synthetic construct
RLEDEHRLFEKPREEATDMTRWMRDFPGAWAETAGAGEAKLQPPVVIELKSTATPVAIRQYPMTREARDGIQPHIARLLQLGVLVQCQSPWNTPLLPVKKPGTNDYRPVQDLREVNKRVQDIHPTVPNPYNLLSSIPPDRTWYTVLDLKDAFFCLKLHPDSQKLFAFEWKNPDTGSSGQLTWTRLPQGFKNSPTIFNEALHKDLAAYRARNPQVTLLQYVDDLLLAGATQEDCLTGTKGLLSELAVLGYRASAKKAQICQRKVTYLGYVLEGGQRWLTEGRMATVMQIPVPTTPRQVREFLGKAGFCRLFIPGFATLAEPLYPLTKPGQPFHWGEEQQKAFQEIKKALLSAPALSLPNVEKPFTLYIDEKRGIARGVLTQTLGPWRRPVAYLSKRLDSVARGWPACLRAIAATALLVKDADKLTLGQKLTIIAPHALESIIRQPPDRWMSNARITHYQSLLLNEERVTFGTPAALNPATLLPEVEEGREILHPCLEVLAEETGVRRDLQDTPLAMADHTWFTDGSSYLSDGQRKAGAAVVDLQKTIWASSLPEGTSAQKAELIALTKALQMAKGKRVNIYTDSRYAFATAHVHGAIYQQRGWLTSAGKEIKNKTEILELLEAVLQPKQLAIIHCPGHQKGKSEIAEGNRRADLAAREAALKPSILPLS

SEQ ID NO: 316 - protein, 675 aa, synthetic construct
QVNDEQLITALSLTISCVEPKPENHNFEQILSKTYPLVWATDIPGKSKRATPIVVELKVGARPVVRKQYPLRIEDRKGIEPIIKRFLELGLLVECESDFNTPILPVKKPNGTYRLVQDLRAVNEITKTLHPVVANPYTLLTRLKDSLAWFTVLDLKDAFFCLPLAPESQRIFAFEWESVDRGRKTQLTWTRLPQGWSNSPTIFNNQLAKELEQWEGPPGDGALLQYVDDLLIATVTEEECIEWTISLLNFLGLSGYRVSQQKAQLVQKEVVYLGYEISRGQRSLGAARKEAICQMPKPETVRDLRAFLGKTGWCRLFIYQYGILAKPLYDLLKPTKNVLVWTPEAEGAFKRLKRELMRAPALGLPDVSKPFWLFSHERQGMALGVLAQQLGPHKRAVAYFSKRLDEVSKGWPGCLRAVAAVIINIEEARKFTLGQKVTVLVSHTVSAVLEQKGNHWLSPSRFLKYQAILAESDDVTIQVTNIVNPASFLEGRAPAEPIEHDCLETIEAVYSSRPDLKEEPFEGADNWFSDGSSFVRQGVRMAGYAVTTTERVIESNPLPAGTSSQKAELIALTRALELAENMQINIWTDSKYAFSVVHAHGAIWKERGWLTTQGKTVKHAGEVLRLLEAVQLPTQVAIMHCKGHLKGNTIPEIGNRKADTEAKLVAIRNKEAEIA

SEQ ID NO: 317 - protein, 671 aa, synthetic construct
EVNDQKYIELLSLTLTAIGIKEEIDEEILSQVFPGVWASDVPGRAKNASPIIIKLKEGAQPVRIKQYPLKKEDREGISPIIENFLRLGLLKECQSDFNTPILPVRKPDGSYRIVQDLRAVNKITEDLYPVVANPYTLLTCLTPELTWFTVLDLKDAFFCLPIHKASQKIFAFEWESPKSGRKTQLTWTRLPQGWKNSPTLFNEKLAKDLESWEAPQEEGRLLQYVDDLLVATQTREACVAWTVSLLNLLGLQGYRVSKKKAQIVKQKVIYLGYEVSAGQRTLGQARKEAICQTPKPQTIKELQTFLGKAGWCRLFVYNYGLLVRPLYALIAPGSRDLQWTKEATRAFHQLKNALMSAPALGLPDVSKPFFLFSHKKQGIALGILAQDLGPYRRAVAYLSKQLDATAKGWPGCLRAVAAVVLNIQEARKFTLGQKLTVLVSHTVSAVLEVKGGHWLSPQRFLKYQAIMVEQDDVEIVVTNIVNSASFLSGNQGEAVHHDCLETIEATYSSRPDLKDTPLEDAETWFTDGSSYITNGKRHAGYAVTTYREVIESGPLPTGTSAQKAEIIALTRALERAKGRRINIYTDSRYAFGVVHAHGAIWKERGWLTSQGKNMKHAQEIIQLLEAVQLPEKVAIMHIKAHQKVSSELEEGNELADREAKEAARGEVATEG

SEQ ID NO: 318 - protein, 675 aa, synthetic construct
QVNDEQLITALSLTISCVEPKPENHNFERILSKTYPLVWATDIPGKSKRATPIVVELKVGARPVVRKQYPLRIEDRKGIEPIIKRFLELGLLVECESDFNTPILPVKKPNGTYRLVQDLRAVNEITKTLHPVVANPYTLLTRLKDSLAWFTVLDLKDAFFCLPLAPESQRIFAFEWESVDRGRKTQLTWTRLPQGWSNSPTIFNNQLAKELEQWEGPPGDGALLQYVDDLLIATVTEEECIEWTISLLNFLGLSGYRVSQQKAQLVQKEVVYLGYEISRGQRSLGAARKEAICQMPKPETVRDLRAFLGKTGWCRLFIYQYGILAKPLYDLLKPTKNVLVWTPEAEGAFKRLKRELMRAPALGLPDVSKPFWLFSHERQGMALGVLAQQLGPHKRAVAYFSKRLDEVSKGWPGCLRAVAAVIINIEEARKLTLGQKVTVLVSHTVSAVLEQKGNHWLSPSRFLKYQAILAESDDVTIQVTNIVNPASFLEGRAPAEPIEHDCLETIEAVYSSRPDLKEEPFEDADNWFSDGSSFVKQGVRMAGYAVTTTERVIESNPLPAGTSAQKAELIALTRALELAENMQINIWTDSKYAFSVVHAHGAIWKERGWLTTQGKTVKHAEEVLRLLEAVQLPTQVAIMHCKGHLKGNTIPEIGNRKADTEAKLAAARNREAEIA

SEQ ID NO: 319 - protein, 675 aa, synthetic construct
QVNEEQLITALSLTISCVEPKPENHNFEQILSETYPLVWATDIPGRSKQAAPIVVELKVGAKPVKRKQYPLRIEDRKGIEPIIKRFLELGLLVECESDFNTPILPVKKPNGAYRLVQDLRVVNEITKTLHPVVANPYTLLTRLKENLAWFTVLDLKDAFFCLPLAPESQKIFAFEWESVDRGRKTQLTWTVLPQGWSNSPTIFNNQLAKELEQWERPLGDGTLLQYVDDLLIGTVTEEECIEWTISLLNFLGLSGYRVSQQKAQLVQKEVVYLGYEVSRGQRSLGAARKEAICQMPKPETVRDLRAFLGKTGWCRLFIYQYGILAKPLYDLLKPTKNVLVWTPEAEGAFKKLRLELMRAPALGLPDVSKPFWLFSHERQGMALGVLAQQVGPHKRAVAYFSKQLDEVSKGWPGCLRAVAAVIINIEEARKLTLGQKVTVLVSHTVSAVLEQKGNHWLSPSRFLKYQAILAESDDVTIQVTNIVNPASFLKGRAPAEPIEHDCLETIEAIYSSRPDLKEEPFEDADNWFSDGSSFVRRGVRMAGYAVTTTERVIESNPLPAGTSAQKAELIALTRALELAENMQINIWTDSKYAFSVVHAHGAIWKERGWLTTQGKTVKHAEEVLRLLKAVQLPAQVAIMHCKGHLKGNTIPEIGNRKADAEAKLAVTRAREVKVT

SEQ ID NO: 320 - RNA, 117 nt, synthetic construct
  source 1..117: mol_type = other RNA
tagcgaactgagaagggccagttttagagctagaaatagcaagttaaaataaggctagtccgttatcaacttgaaaaagtggcaccgagtcggtgccctcggcccttctcagttcgc

SEQ ID NO: 321 - RNA, 116 nt, synthetic construct
  source 1..116: mol_type = other RNA
tagcgaactgagaagggccagttttagagctagaaatagcaagttaaaataaggctagtccgttatcaacttgaaaaagtggcaccgagtcggtgccctcggcccttctcagttcg

SEQ ID NO: 322 - RNA, 115 nt, synthetic construct
  source 1..115: mol_type = other RNA
tagcgaactgagaagggccagttttagagctagaaatagcaagttaaaataaggctagtccgttatcaacttgaaaaagtggcaccgagtcggtgccctcggcccttctcagttc

SEQ ID NO: 323 - RNA, 114 nt, synthetic construct
  source 1..114: mol_type = other RNA
tagcgaactgagaagggccagttttagagctagaaatagcaagttaaaataaggctagtccgttatcaacttgaaaaagtggcaccgagtcggtgccctcggcccttctcagtt

SEQ ID NO: 324 - RNA, 113 nt, synthetic construct
  source 1..113: mol_type = other RNA
tagcgaactgagaagggccagttttagagctagaaatagcaagttaaaataaggctagtccgttatcaacttgaaaaagtggcaccgagtcggtgccctcggcccttctcagt

SEQ ID NO: 325 - RNA, 112 nt, synthetic construct
  source 1..112: mol_type = other RNA
tagcgaactgagaagggccagttttagagctagaaatagcaagttaaaataaggctagtccgttatcaacttgaaaaagtggcaccgagtcggtgccctcggcccttctcag

SEQ ID NO: 326 - RNA, 111 nt, synthetic construct
  source 1..111: mol_type = other RNA
tagcgaactgagaagggccagttttagagctagaaatagcaagttaaaataaggctagtccgttatcaacttgaaaaagtggcaccgagtcggtgccctcggcccttctca

SEQ ID NO: 327 - RNA, 110 nt, synthetic construct
  source 1..110: mol_type = other RNA
tagcgaactgagaagggccagttttagagctagaaatagcaagttaaaataaggctagtccgttatcaacttgaaaaagtggcaccgagtcggtgccctcggcccttctc

SEQ ID NO: 328 - RNA, 109 nt, synthetic construct
  source 1..109: mol_type = other RNA
tagcgaactgagaagggccagttttagagctagaaatagcaagttaaaataaggctagtccgttatcaacttgaaaaagtggcaccgagtcggtgccctcggcccttct

SEQ ID NO: 329 - RNA, 119 nt, synthetic construct
  source 1..119: mol_type = other RNA
tagcgaactgagaagggccagttttagagctagaaatagcaagttaaaataaggctagtccgttatcaacttgaaaaagtggcaccgagtcggtgctacctcggcccttctcagttcgc

SEQ ID NO: 330 - RNA, 118 nt, synthetic construct
  source 1..118: mol_type = other RNA
tagcgaactgagaagggccagttttagagctagaaatagcaagttaaaataaggctagtccgttatcaacttgaaaaagtggcaccgagtcggtgctacctcggcccttctcagttcg

SEQ ID NO: 331 - RNA, 117 nt, synthetic construct
  source 1..117: mol_type = other RNA
tagcgaactgagaagggccagttttagagctagaaatagcaagttaaaataaggctagtccgttatcaacttgaaaaagtggcaccgagtcggtgctacctcggcccttctcagttc

SEQ ID NO: 332 - RNA, 116 nt, synthetic construct
  source 1..116: mol_type = other RNA
tagcgaactgagaagggccagttttagagctagaaatagcaagttaaaataaggctagtccgttatcaacttgaaaaagtggcaccgagtcggtgctacctcggcccttctcagtt

SEQ ID NO: 333 - RNA, 115 nt, synthetic construct
  source 1..115: mol_type = other RNA
tagcgaactgagaagggccagttttagagctagaaatagcaagttaaaataaggctagtccgttatcaacttgaaaaagtggcaccgagtcggtgctacctcggcccttctcagt

SEQ ID NO: 334 - RNA, 114 nt, synthetic construct
  source 1..114: mol_type = other RNA
tagcgaactgagaagggccagttttagagctagaaatagcaagttaaaataaggctagtccgttatcaacttgaaaaagtggcaccgagtcggtgctacctcggcccttctcag

SEQ ID NO: 335 - RNA, 113 nt, synthetic construct
  source 1..113: mol_type = other RNA
tagcgaactgagaagggccagttttagagctagaaatagcaagttaaaataaggctagtccgttatcaacttgaaaaagtggcaccgagtcggtgctacctcggcccttctca

SEQ ID NO: 336 - RNA, 112 nt, synthetic construct
  source 1..112: mol_type = other RNA
tagcgaactgagaagggccagttttagagctagaaatagcaagttaaaataaggctagtccgttatcaacttgaaaaagtggcaccgagtcggtgctacctcggcccttctc

SEQ ID NO: 337 - RNA, 111 nt, synthetic construct
  source 1..111: mol_type = other RNA
tagcgaactgagaagggccagttttagagctagaaatagcaagttaaaataaggctagtccgttatcaacttgaaaaagtggcaccgagtcggtgctacctcggcccttct

SEQ ID NO: 338 - RNA, 121 nt, synthetic construct
  source 1..121: mol_type = other RNA
tagcgaactgagaagggccagttttagagctagaaatagcaagttaaaataaggctagtccgttatcaacttgaaaaagtggcaccgagtcggtgcaatacctcggcccttctcagttcgc

SEQ ID NO: 339 - RNA, 120 nt, synthetic construct
  source 1..120: mol_type = other RNA
tagcgaactgagaagggccagttttagagctagaaatagcaagttaaaataaggctagtccgttatcaacttgaaaaagtggcaccgagtcggtgcaatacctcggcccttctcagttcg

SEQ ID NO: 340 - RNA, 119 nt, synthetic construct
  source 1..119: mol_type = other RNA
tagcgaactgagaagggccagttttagagctagaaatagcaagttaaaataaggctagtccgttatcaacttgaaaaagtggcaccgagtcggtgcaatacctcggcccttctcagttc

SEQ ID NO: 341 - RNA, 118 nt, synthetic construct
  source 1..118: mol_type = other RNA
tagcgaactgagaagggccagttttagagctagaaatagcaagttaaaataaggctagtccgttatcaacttgaaaaagtggcaccgagtcggtgcaatacctcggcccttctcagtt

SEQ ID NO: 342 - RNA, 117 nt, synthetic construct
  source 1..117: mol_type = other RNA
tagcgaactgagaagggccagttttagagctagaaatagcaagttaaaataaggctagtccgttatcaacttgaaaaagtggcaccgagtcggtgcaatacctcggcccttctcagt

SEQ ID NO: 343 - RNA, 116 nt, synthetic construct
  source 1..116: mol_type = other RNA
tagcgaactgagaagggccagttttagagctagaaatagcaagttaaaataaggctagtccgttatcaacttgaaaaagtggcaccgagtcggtgcaatacctcggcccttctcag

SEQ ID NO: 344 - RNA, 115 nt, synthetic construct
  source 1..115: mol_type = other RNA
tagcgaactgagaagggccagttttagagctagaaatagcaagttaaaataaggctagtccgttatcaacttgaaaaagtggcaccgagtcggtgcaatacctcggcccttctca

SEQ ID NO: 345 - RNA, 114 nt, synthetic construct
  source 1..114: mol_type = other RNA
tagcgaactgagaagggccagttttagagctagaaatagcaagttaaaataaggctagtccgttatcaacttgaaaaagtggcaccgagtcggtgcaatacctcggcccttctc

SEQ ID NO: 346 - RNA, 113 nt, synthetic construct
  source 1..113: mol_type = other RNA
tagcgaactgagaagggccagttttagagctagaaatagcaagttaaaataaggctagtccgttatcaacttgaaaaagtggcaccgagtcggtgcaatacctcggcccttct

SEQ ID NO: 347 - RNA, 122 nt, synthetic construct
  source 1..122: mol_type = other RNA
tagcgaactgagaagggccagttttagagctagaaatagcaagttaaaataaggctagtccgttatcaacttgaaaaagtggcaccgagtcggtgcacaatacctcggcccttctcagttcg

SEQ ID NO: 348 - RNA, 121 nt, synthetic construct
  source 1..121: mol_type = other RNA
tagcgaactgagaagggccagttttagagctagaaatagcaagttaaaataaggctagtccgttatcaacttgaaaaagtggcaccgagtcggtgcacaatacctcggcccttctcagttc

SEQ ID NO: 349 - RNA, 120 nt, synthetic construct
  source 1..120: mol_type = other RNA
tagcgaactgagaagggccagttttagagctagaaatagcaagttaaaataaggctagtccgttatcaacttgaaaaagtggcaccgagtcggtgcacaatacctcggcccttctcagtt

SEQ ID NO: 350 - RNA, 119 nt, synthetic construct
  source 1..119: mol_type = other RNA
tagcgaactgagaagggccagttttagagctagaaatagcaagttaaaataaggctagtccgttatcaacttgaaaaagtggcaccgagtcggtgcacaatacctcggcccttctcagt

SEQ ID NO: 351 - RNA, 118 nt, synthetic construct
  source 1..118: mol_type = other RNA
tagcgaactgagaagggccagttttagagctagaaatagcaagttaaaataaggctagtccgttatcaacttgaaaaagtggcaccgagtcggtgcacaatacctcggcccttctcag

SEQ ID NO: 352 - RNA, 117 nt, synthetic construct
  source 1..117: mol_type = other RNA
tagcgaactgagaagggccagttttagagctagaaatagcaagttaaaataaggctagtccgttatcaacttgaaaaagtggcaccgagtcggtgcacaatacctcggcccttctca

SEQ ID NO: 353 - RNA, 116 nt, synthetic construct
  source 1..116: mol_type = other RNA
tagcgaactgagaagggccagttttagagctagaaatagcaagttaaaataaggctagtccgttatcaacttgaaaaagtggcaccgagtcggtgcacaatacctcggcccttctc

SEQ ID NO: 354 - RNA, 115 nt, synthetic construct
  source 1..115: mol_type = other RNA
tagcgaactgagaagggccagttttagagctagaaatagcaagttaaaataaggctagtccgttatcaacttgaaaaagtggcaccgagtcggtgcacaatacctcggcccttct

SEQ ID NO: 355 - RNA, 125 nt, synthetic construct
  source 1..125: mol_type = other RNA
tagcgaactgagaagggccagttttagagctagaaatagcaagttaaaataaggctagtccgttatcaacttgaaaaagtggcaccgagtcggtgcccacaatacctcggcccttctcagttcgc

SEQ ID NO: 356 - RNA, 124 nt, synthetic construct
  source 1..124: mol_type = other RNA
tagcgaactgagaagggccagttttagagctagaaatagcaagttaaaataaggctagtccgttatcaacttgaaaaagtggcaccgagtcggtgcccacaatacctcggcccttctcagttcg

SEQ ID NO: 357 - RNA, 123 nt, synthetic construct
  source 1..123: mol_type = other RNA
tagcgaactgagaagggccagttttagagctagaaatagcaagttaaaataaggctagtccgttatcaacttgaaaaagtggcaccgagtcggtgcccacaatacctcggcccttctcagttc

SEQ ID NO: 358 - RNA, 122 nt, synthetic construct
  source 1..122: mol_type = other RNA
tagcgaactgagaagggccagttttagagctagaaatagcaagttaaaataaggctagtccgttatcaacttgaaaaagtggcaccgagtcggtgcccacaatacctcggcccttctcagtt

SEQ ID NO: 359 - RNA, 121 nt, synthetic construct
  source 1..121: mol_type = other RNA
tagcgaactgagaagggccagttttagagctagaaatagcaagttaaaataaggctagtccgttatcaacttgaaaaagtggcaccgagtcggtgcccacaatacctcggcccttctcagt

SEQ ID NO: 360 - RNA, 120 nt, synthetic construct
  source 1..120: mol_type = other RNA
tagcgaactgagaagggccagttttagagctagaaatagcaagttaaaataaggctagtccgttatcaacttgaaaaagtggcaccgagtcggtgcccacaatacctcggcccttctcag

SEQ ID NO: 361 - RNA, 119 nt, synthetic construct
  source 1..119: mol_type = other RNA
tagcgaactgagaagggccagttttagagctagaaatagcaagttaaaataaggctagtccgttatcaacttgaaaaagtggcaccgagtcggtgcccacaatacctcggcccttctca

SEQ ID NO: 362 - RNA, 118 nt, synthetic construct
  source 1..118: mol_type = other RNA
tagcgaactgagaagggccagttttagagctagaaatagcaagttaaaataaggctagtccgttatcaacttgaaaaagtggcaccgagtcggtgcccacaatacctcggcccttctc

SEQ ID NO: 363 - RNA, 117 nt, synthetic construct
  source 1..117: mol_type = other RNA
tagcgaactgagaagggccagttttagagctagaaatagcaagttaaaataaggctagtccgttatcaacttgaaaaagtggcaccgagtcggtgcccacaatacctcggcccttct

SEQ ID NO: 364 - RNA, 118 nt, synthetic construct
  source 1..118: mol_type = other RNA
actttgctgccacaatacctgttttagagctagaaatagcaagttaaaataaggctagtccgttatcaacttgaaaaagtggcaccgagtcggtgcgccgaggtattgtggcagcaaa

SEQ ID NO: 365 - RNA, 117 nt, synthetic construct
  source 1..117: mol_type = other RNA
actttgctgccacaatacctgttttagagctagaaatagcaagttaaaataaggctagtccgttatcaacttgaaaaagtggcaccgagtcggtgcgccgaggtattgtggcagcaa

SEQ ID NO: 366 - RNA, 116 nt, synthetic construct
  source 1..116: mol_type = other RNA
actttgctgccacaatacctgttttagagctagaaatagcaagttaaaataaggctagtccgttatcaacttgaaaaagtggcaccgagtcggtgcgccgaggtattgtggcagca

SEQ ID NO: 367 - RNA, 115 nt, synthetic construct
  source 1..115: mol_type = other RNA
actttgctgccacaatacctgttttagagctagaaatagcaagttaaaataaggctagtccgttatcaacttgaaaaagtggcaccgagtcggtgcgccgaggtattgtggcagc

SEQ ID NO: 368 - RNA, 114 nt, synthetic construct
  source 1..114: mol_type = other RNA
actttgctgccacaatacctgttttagagctagaaatagcaagttaaaataaggctagtccgttatcaacttgaaaaagtggcaccgagtcggtgcgccgaggtattgtggcag

SEQ ID NO: 369 - RNA, 113 nt, synthetic construct
  source 1..113: mol_type = other RNA
actttgctgccacaatacctgttttagagctagaaatagcaagttaaaataaggctagtccgttatcaacttgaaaaagtggcaccgagtcggtgcgccgaggtattgtggca

SEQ ID NO: 370 - RNA, 112 nt, synthetic construct
  source 1..112: mol_type = other RNA
actttgctgccacaatacctgttttagagctagaaatagcaagttaaaataaggctagtccgttatcaacttgaaaaagtggcaccgagtcggtgcgccgaggtattgtggc

SEQ ID NO: 371 - RNA, 111 nt, synthetic construct
  source 1..111: mol_type = other RNA
actttgctgccacaatacctgttttagagctagaaatagcaagttaaaataaggctagtccgttatcaacttgaaaaagtggcaccgagtcggtgcgccgaggtattgtgg

SEQ ID NO: 372 - RNA, 110 nt, synthetic construct
  source 1..110: mol_type = other RNA
actttgctgccacaatacctgttttagagctagaaatagcaagttaaaataaggctagtccgttatcaacttgaaaaagtggcaccgagtcggtgcgccgaggtattgtg

SEQ ID NO: 373 - RNA, 120 nt, synthetic construct
  source 1..120: mol_type = other RNA
actttgctgccacaatacctgttttagagctagaaatagcaagttaaaataaggctagtccgttatcaacttgaaaaagtggcaccgagtcggtgcgggccgaggtattgtggcagcaaa

SEQ ID NO: 374 - RNA, 119 nt, synthetic construct
  source 1..119: mol_type = other RNA
actttgctgccacaatacctgttttagagctagaaatagcaagttaaaataaggctagtccgttatcaacttgaaaaagtggcaccgagtcggtgcgggccgaggtattgtggcagcaa

SEQ ID NO: 375 - RNA, 118 nt, synthetic construct
  source 1..118: mol_type = other RNA
actttgctgccacaatacctgttttagagctagaaatagcaagttaaaataaggctagtccgttatcaacttgaaaaagtggcaccgagtcggtgcgggccgaggtattgtggcagca

SEQ ID NO: 376 - RNA, 117 nt, synthetic construct
  source 1..117: mol_type = other RNA
actttgctgccacaatacctgttttagagctagaaatagcaagttaaaataaggctagtccgttatcaacttgaaaaagtggcaccgagtcggtgcgggccgaggtattgtggcagc

SEQ ID NO: 377 - RNA, 116 nt, synthetic construct
  source 1..116: mol_type = other RNA
actttgctgccacaatacctgttttagagctagaaatagcaagttaaaataaggctagtccgttatcaacttgaaaaagtggcaccgagtcggtgcgggccgaggtattgtggcag

SEQ ID NO: 378 - RNA, 115 nt, synthetic construct
  source 1..115: mol_type = other RNA
actttgctgccacaatacctgttttagagctagaaatagcaagttaaaataaggctagtccgttatcaacttgaaaaagtggcaccgagtcggtgcgggccgaggtattgtggca

SEQ ID NO: 379 - RNA, 114 nt, synthetic construct
  source 1..114: mol_type = other RNA
actttgctgccacaatacctgttttagagctagaaatagcaagttaaaataaggctagtccgttatcaacttgaaaaagtggcaccgagtcggtgcgggccgaggtattgtggc

SEQ ID NO: 380 - RNA, 113 nt, synthetic construct
  source 1..113: mol_type = other RNA
actttgctgccacaatacctgttttagagctagaaatagcaagttaaaataaggctagtccgttatcaacttgaaaaagtggcaccgagtcggtgcgggccgaggtattgtgg

SEQ ID NO: 381 - RNA, 112 nt, synthetic construct
  source 1..112: mol_type = other RNA
actttgctgccacaatacctgttttagagctagaaatagcaagttaaaataaggctagtccgttatcaacttgaaaaagtggcaccgagtcggtgcgggccgaggtattgtg

SEQ ID NO: 382 - RNA, 122 nt, synthetic construct
  source 1..122: mol_type = other RNA
actttgctgccacaatacctgttttagagctagaaatagcaagttaaaataaggctagtccgttatcaacttgaaaaagtggcaccgagtcggtgcaagggccgaggtattgtggcagcaaa

SEQ ID NO: 383 - RNA, 121 nt, synthetic construct
  source 1..121: mol_type = other RNA
actttgctgccacaatacctgttttagagctagaaatagcaagttaaaataaggctagtccgttatcaacttgaaaaagtggcaccgagtcggtgcaagggccgaggtattgtggcagcaa

SEQ ID NO: 384 - RNA, 120 nt, synthetic construct
  source 1..120: mol_type = other RNA
actttgctgccacaatacctgttttagagctagaaatagcaagttaaaataaggctagtccgttatcaacttgaaaaagtggcaccgagtcggtgcaagggccgaggtattgtggcagca

SEQ ID NO: 385 - RNA, 119 nt, synthetic construct
  source 1..119: mol_type = other RNA
actttgctgccacaatacctgttttagagctagaaatagcaagttaaaataaggctagtccgttatcaacttgaaaaagtggcaccgagtcggtgcaagggccgaggtattgtggcagc

SEQ ID NO: 386 - RNA, 118 nt, synthetic construct
  source 1..118: mol_type = other RNA
actttgctgccacaatacctgttttagagctagaaatagcaagttaaaataaggctagtccgttatcaacttgaaaaagtggcaccgagtcggtgcaagggccgaggtattgtggcag

SEQ ID NO: 387 - RNA, 117 nt, synthetic construct
  source 1..117: mol_type = other RNA
actttgctgccacaatacctgttttagagctagaaatagcaagttaaaataaggctagtccgttatcaacttgaaaaagtggcaccgagtcggtgcaagggccgaggtattgtggca

SEQ ID NO: 388 - RNA, 116 nt, synthetic construct
  source 1..116: mol_type = other RNA
actttgctgccacaatacctgttttagagctagaaatagcaagttaaaataaggctagtccgttatcaacttgaaaaagtggcaccgagtcggtgcaagggccgaggtattgtggc

SEQ ID NO: 389 - RNA, 115 nt, synthetic construct
  source 1..115: mol_type = other RNA
actttgctgccacaatacctgttttagagctagaaatagcaagttaaaataaggctagtccgttatcaacttgaaaaagtggcaccgagtcggtgcaagggccgaggtattgtgg

SEQ ID NO: 390 - RNA, 114 nt, synthetic construct
  source 1..114: mol_type = other RNA
actttgctgccacaatacctgttttagagctagaaatagcaagttaaaataaggctagtccgttatcaacttgaaaaagtggcaccgagtcggtgcaagggccgaggtattgtg

SEQ ID NO: 391 - RNA, 124 nt, synthetic construct
  source 1..124: mol_type = other RNA
actttgctgccacaatacctgttttagagctagaaatagcaagttaaaataaggctagtccgttatcaacttgaaaaagtggcaccgagtcggtgcagaagggccgaggtattgtggcagcaaa

SEQ ID NO: 392 - RNA, 123 nt, synthetic construct
  source 1..123: mol_type = other RNA
actttgctgccacaatacctgttttagagctagaaatagcaagttaaaataaggctagtccgttatcaacttgaaaaagtggcaccgagtcggtgcagaagggccgaggtattgtggcagcaa

SEQ ID NO: 393 - RNA, 122 nt, synthetic construct
  source 1..122: mol_type = other RNA
actttgctgccacaatacctgttttagagctagaaatagcaagttaaaataaggctagtccgttatcaacttgaaaaagtggcaccgagtcggtgcagaagggccgaggtattgtggcagca

SEQ ID NO: 394 - RNA, 121 nt, synthetic construct
  source 1..121: mol_type = other RNA
actttgctgccacaatacctgttttagagctagaaatagcaagttaaaataaggctagtccgttatcaacttgaaaaagtggcaccgagtcggtgcagaagggccgaggtattgtggcagc

SEQ ID NO: 395 - RNA, 120 nt, synthetic construct
  source 1..120: mol_type = other RNA
actttgctgccacaatacctgttttagagctagaaatagcaagttaaaataaggctagtccgttatcaacttgaaaaagtggcaccgagtcggtgcagaagggccgaggtattgtggcag

SEQ ID NO: 396 - RNA, 119 nt, synthetic construct
  source 1..119: mol_type = other RNA
actttgctgccacaatacctgttttagagctagaaatagcaagttaaaataaggctagtccgttatcaacttgaaaaagtggcaccgagtcggtgcagaagggccgaggtattgtggca

SEQ ID NO: 397 - RNA, 118 nt, synthetic construct
  source 1..118: mol_type = other RNA
actttgctgccacaatacctgttttagagctagaaatagcaagttaaaataaggctagtccgttatcaacttgaaaaagtggcaccgagtcggtgcagaagggccgaggtattgtggc

SEQ ID NO: 398 - RNA, 117 nt, synthetic construct
  source 1..117: mol_type = other RNA
actttgctgccacaatacctgttttagagctagaaatagcaagttaaaataaggctagtccgttatcaacttgaaaaagtggcaccgagtcggtgcagaagggccgaggtattgtgg

SEQ ID NO: 399 - RNA, 116 nt, synthetic construct
  source 1..116: mol_type = other RNA
actttgctgccacaatacctgttttagagctagaaatagcaagttaaaataaggctagtccgttatcaacttgaaaaagtggcaccgagtcggtgcagaagggccgaggtattgtg

SEQ ID NO: 400 - RNA, 126 nt, synthetic construct
  source 1..126: mol_type = other RNA
actttgctgccacaatacctgttttagagctagaaatagcaagttaaaataaggctagtccgttatcaacttgaaaaagtggcaccgagtcggtgctgagaagggccgaggtattgtggcagcaaa

SEQ ID NO: 401 - RNA, 125 nt, synthetic construct
  source 1..125: mol_type = other RNA
actttgctgccacaatacctgttttagagctagaaatagcaagttaaaataaggctagtccgttatcaacttgaaaaagtggcaccgagtcggtgctgagaagggccgaggtattgtggcagcaa

SEQ ID NO: 402 - RNA, 124 nt, synthetic construct
  source 1..124: mol_type = other RNA
actttgctgccacaatacctgttttagagctagaaatagcaagttaaaataaggctagtccgttatcaacttgaaaaagtggcaccgagtcggtgctgagaagggccgaggtattgtggcagca

SEQ ID NO: 403 - RNA, 123 nt, synthetic construct
  source 1..123: mol_type = other RNA
actttgctgccacaatacctgttttagagctagaaatagcaagttaaaataaggctagtccgttatcaacttgaaaaagtggcaccgagtcggtgctgagaagggccgaggtattgtggcagc

SEQ ID NO: 404 - RNA, 122 nt, synthetic construct
  source 1..122: mol_type = other RNA
actttgctgccacaatacctgttttagagctagaaatagcaagttaaaataaggctagtccgttatcaacttgaaaaagtggcaccgagtcggtgctgagaagggccgaggtattgtggcag

SEQ ID NO: 405 - RNA, 121 nt, synthetic construct
  source 1..121: mol_type = other RNA
actttgctgccacaatacctgttttagagctagaaatagcaagttaaaataaggctagtccgttatcaacttgaaaaagtggcaccgagtcggtgctgagaagggccgaggtattgtggca

SEQ ID NO: 406 - RNA, 120 nt, synthetic construct
  source 1..120: mol_type = other RNA
actttgctgccacaatacctgttttagagctagaaatagcaagttaaaataaggctagtccgttatcaacttgaaaaagtggcaccgagtcggtgctgagaagggccgaggtattgtggc

SEQ ID NO: 407 - RNA, 119 nt, synthetic construct
  source 1..119: mol_type = other RNA
actttgctgccacaatacctgttttagagctagaaatagcaagttaaaataaggctagtccgttatcaacttgaaaaagtggcaccgagtcggtgctgagaagggccgaggtattgtgg

SEQ ID NO: 408 - RNA, 118 nt, synthetic construct
  source 1..118: mol_type = other RNA
actttgctgccacaatacctgttttagagctagaaatagcaagttaaaataaggctagtccgttatcaacttgaaaaagtggcaccgagtcggtgctgagaagggccgaggtattgtg

SEQ ID NO: 409 - RNA, 117 nt, synthetic construct; identical to SEQ ID NO: 320
  modified_base 1: mod_base = um
  modified_base 2: mod_base = OTHER; note = Phosphorothioate (PS) linkage
  modified_base 2: mod_base = OTHER; note = 2'-O-methyladenosine
  modified_base 3: mod_base = OTHER; note = Phosphorothioate (PS) linkage
  modified_base 3: mod_base = gm
  modified_base 4: mod_base = OTHER; note = Phosphorothioate (PS) linkage
  modified_base 29: mod_base = gm
  modified_base 30: mod_base = cm
  modified_base 31: mod_base = um
  modified_base 32: mod_base = OTHER; note = 2'-O-methyladenosine
  modified_base 33: mod_base = gm
  modified_base 34: mod_base = OTHER; note = 2'-O-methyladenosine
  modified_base 35: mod_base = OTHER; note = 2'-O-methyladenosine
  modified_base 36: mod_base = OTHER; note = 2'-O-methyladenosine
  modified_base 37: mod_base = um
  modified_base 38: mod_base = OTHER; note = 2'-O-methyladenosine
  modified_base 39: mod_base = gm
  modified_base 40: mod_base = cm
  modified_base 68: mod_base = OTHER; note = 2'-O-methyladenosine
  modified_base 69: mod_base = OTHER; note = 2'-O-methyladenosine
  modified_base 70: mod_base = cm
  modified_base 71: mod_base = um
  modified_base 72: mod_base = um
  modified_base 73: mod_base = gm
  modified_base 74: mod_base = OTHER; note = 2'-O-methyladenosine
  modified_base 75: mod_base = OTHER; note = 2'-O-methyladenosine
  modified_base 76: mod_base = OTHER; note = 2'-O-methyladenosine
  modified_base 77: mod_base = OTHER; note = 2'-O-methyladenosine
  modified_base 78: mod_base = OTHER; note = 2'-O-methyladenosine
  modified_base 79: mod_base = gm
  modified_base 80: mod_base = um
  modified_base 81: mod_base = gm
  modified_base 82: mod_base = gm
  modified_base 83: mod_base = cm
  modified_base 84: mod_base = OTHER; note = 2'-O-methyladenosine
  modified_base 85: mod_base = cm
  modified_base 86: mod_base = cm
  modified_base 87: mod_base = gm
  modified_base 88: mod_base = OTHER; note = 2'-O-methyladenosine
  modified_base 89: mod_base = gm
  modified_base 90: mod_base = um
  modified_base 91: mod_base = cm
  modified_base 92: mod_base = gm
  modified_base 93: mod_base = gm
  modified_base 94: mod_base = um
  modified_base 95: mod_base = gm
  modified_base 96: mod_base = cm
  modified_base 115: mod_base = OTHER; note = Phosphorothioate (PS) linkage
  modified_base 115: mod_base = cm
  modified_base 116: mod_base = OTHER; note = Phosphorothioate (PS) linkage
  modified_base 116: mod_base = gm
  modified_base 117: mod_base = OTHER; note = Phosphorothioate (PS) linkage
  modified_base 117: mod_base = cm
  source 1..117: mol_type = other RNA

SEQ ID NO: 410 - RNA, 116 nt, synthetic construct; identical to SEQ ID NO: 321
  modified_base 1: mod_base = um
  modified_base 2: mod_base = OTHER; note = Phosphorothioate (PS) linkage
  modified_base 2: mod_base = OTHER; note = 2'-O-methyladenosine
  modified_base 3: mod_base = OTHER; note = Phosphorothioate (PS) linkage
  modified_base 3: mod_base = gm
  modified_base 4: mod_base = OTHER; note = Phosphorothioate (PS) linkage
  modified_base 29: mod_base = gm
  modified_base 30: mod_base = cm
  modified_base 31: mod_base = um
  modified_base 32: mod_base = OTHER; note = 2'-O-methyladenosine
  modified_base 33: mod_base = gm
  modified_base 34: mod_base = OTHER; note = 2'-O-methyladenosine
  modified_base 35: mod_base = OTHER; note = 2'-O-methyladenosine
  modified_base 36: mod_base = OTHER; note = 2'-O-methyladenosine
  modified_base 37: mod_base = um
  modified_base 38: mod_base = OTHER; note = 2'-O-methyladenosine
  modified_base 39: mod_base = gm
  modified_base 40: mod_base = cm
  modified_base 68: mod_base = OTHER; note = 2'-O-methyladenosine
  modified_base 69: mod_base = OTHER; note = 2'-O-methyladenosine
  modified_base 70: mod_base = cm
  modified_base 71: mod_base = um
  modified_base 72: mod_base = um
  modified_base 73: mod_base = gm
  modified_base 74: mod_base = OTHER; note = 2'-O-methyladenosine
  modified_base 75: mod_base = OTHER; note = 2'-O-methyladenosine
  modified_base 76: mod_base = OTHER; note = 2'-O-methyladenosine
  modified_base 77: mod_base = OTHER; note = 2'-O-methyladenosine
  modified_base 78: mod_base = OTHER; note = 2'-O-methyladenosine
  modified_base 79: mod_base = gm
  modified_base 80: mod_base = um
  modified_base 81: mod_base = gm
  modified_base 82: mod_base = gm
  modified_base 83: mod_base = cm
  modified_base 84: mod_base = OTHER; note = 2'-O-methyladenosine
  modified_base 85: mod_base = cm
  modified_base 86: mod_base = cm
  modified_base 87: mod_base = gm
  modified_base 88: mod_base = OTHER; note = 2'-O-methyladenosine
  modified_base 89: mod_base = gm
  modified_base 90: mod_base = um
  modified_base 91: mod_base = cm
  modified_base 92: mod_base = gm
  modified_base 93: mod_base = gm
  modified_base 94: mod_base = um
  modified_base 95: mod_base = gm
  modified_base 96: mod_base = cm
  modified_base 114: mod_base = OTHER; note = Phosphorothioate (PS) linkage
  modified_base 114: mod_base = um
  modified_base 115: mod_base = OTHER; note = Phosphorothioate (PS) linkage
  modified_base 115: mod_base = cm
  modified_base 116: mod_base = OTHER; note = Phosphorothioate (PS) linkage
  modified_base 116: mod_base = gm
  source 1..116: mol_type = other RNA

SEQ ID NO: 411 - RNA, 115 nt, synthetic construct; identical to SEQ ID NO: 322
  modified_base 1: mod_base = um
  modified_base 2: mod_base = OTHER; note = Phosphorothioate (PS) linkage
  modified_base 2: mod_base = OTHER; note = 2'-O-methyladenosine
  modified_base 3: mod_base = OTHER; note = Phosphorothioate (PS) linkage
  modified_base 3: mod_base = gm
  modified_base 4: mod_base = OTHER; note = Phosphorothioate (PS) linkage
  modified_base 29: mod_base = gm
  modified_base 30: mod_base = cm
  modified_base 31: mod_base = um
  modified_base 32: mod_base = OTHER; note = 2'-O-methyladenosine
  modified_base 33: mod_base = gm
  modified_base 34: mod_base = OTHER; note = 2'-O-methyladenosine
  modified_base 35: mod_base = OTHER; note = 2'-O-methyladenosine
  modified_base 36: mod_base = OTHER; note = 2'-O-methyladenosine
  modified_base 37: mod_base = um
  modified_base 38: mod_base = OTHER; note = 2'-O-methyladenosine
  modified_base 39: mod_base = gm
  modified_base 40: mod_base = cm
  modified_base 68: mod_base = OTHER; note = 2'-O-methyladenosine
  modified_base 69: mod_base = OTHER; note = 2'-O-methyladenosine
  modified_base 70: mod_base = cm
  modified_base 71: mod_base = um
  modified_base 72: mod_base = um
  modified_base 73: mod_base = gm
  modified_base 74: mod_base = OTHER; note = 2'-O-methyladenosine
  modified_base 75: mod_base = OTHER; note = 2'-O-methyladenosine
  modified_base 76: mod_base = OTHER; note = 2'-O-methyladenosine
  modified_base 77: mod_base = OTHER; note = 2'-O-methyladenosine
  modified_base 78: mod_base = OTHER; note = 2'-O-methyladenosine
  modified_base 79: mod_base = gm
  modified_base 80: mod_base = um
  modified_base 81: mod_base = gm
  modified_base 82: mod_base = gm
  modified_base 83: mod_base = cm
  modified_base 84: mod_base = OTHER; note = 2'-O-methyladenosine
  modified_base 85: mod_base = cm
  modified_base 86: mod_base = cm
  modified_base 87: mod_base = gm
  modified_base 88: mod_base = OTHER; note = 2'-O-methyladenosine
  modified_base 89: mod_base = gm
  modified_base 90: mod_base = um
  modified_base 91: mod_base = cm
  modified_base 92: mod_base = gm
  modified_base 93: mod_base = gm
  modified_base 94: mod_base = um
  modified_base 95: mod_base = gm
  modified_base 96: mod_base = cm
  modified_base 113: mod_base = OTHER; note = Phosphorothioate (PS) linkage
  modified_base 113: mod_base = um
  modified_base 114: mod_base = OTHER; note = Phosphorothioate (PS) linkage
  modified_base 114: mod_base = um
  modified_base 115: mod_base = OTHER; note = Phosphorothioate (PS) linkage
  modified_base 115: mod_base = cm
  source 1..115: mol_type = other RNA

SEQ ID NO: 412 - RNA, 114 nt, synthetic construct; identical to SEQ ID NO: 323
  modified_base 1: mod_base = um
  modified_base 2: mod_base = OTHER; note = Phosphorothioate (PS) linkage
  modified_base 2: mod_base = OTHER; note = 2'-O-methyladenosine
  modified_base 3: mod_base = OTHER; note = Phosphorothioate (PS) linkage
  modified_base 3: mod_base = gm
  modified_base 4: mod_base = OTHER; note = Phosphorothioate (PS) linkage
  modified_base 29: mod_base = gm
  modified_base 30: mod_base = cm
  modified_base 31: mod_base = um
  modified_base 32: mod_base = OTHER; note = 2'-O-methyladenosine
  modified_base 33: mod_base = gm
  modified_base 34: mod_base = OTHER; note = 2'-O-methyladenosine
  modified_base 35: mod_base = OTHER; note = 2'-O-methyladenosine
  modified_base 36: mod_base = OTHER; note = 2'-O-methyladenosine
  modified_base 37: mod_base = um
  modified_base 38: mod_base = OTHER; note = 2'-O-methyladenosine
  modified_base 39: mod_base = gm
  modified_base 40: mod_base = cm
  modified_base 68: mod_base = OTHER; note = 2'-O-methyladenosine
  modified_base 69: mod_base = OTHER; note = 2'-O-methyladenosine
  modified_base 70: mod_base = cm
  modified_base 71: mod_base = um
  modified_base 72: mod_base = um
  modified_base 73: mod_base = gm
  modified_base 74: mod_base = OTHER; note = 2'-O-methyladenosine
  modified_base 75: mod_base = OTHER; note = 2'-O-methyladenosine
  modified_base 76: mod_base = OTHER; note = 2'-O-methyladenosine
  modified_base 77: mod_base = OTHER; note = 2'-O-methyladenosine
  modified_base 78: mod_base = OTHER; note = 2'-O-methyladenosine
  modified_base 79: mod_base = gm
  modified_base 80: mod_base = um
  modified_base 81: mod_base = gm
  modified_base 82: mod_base = gm
  modified_base 83: mod_base = cm
  modified_base 84: mod_base = OTHER; note = 2'-O-methyladenosine
  modified_base 85: mod_base = cm
  modified_base 86: mod_base = cm
  modified_base 87: mod_base = gm
  modified_base 88: mod_base = OTHER; note = 2'-O-methyladenosine
  modified_base 89: mod_base = gm
  modified_base 90: mod_base = um
  modified_base 91: mod_base = cm
  modified_base 92: mod_base = gm
  modified_base 93: mod_base = gm
  modified_base 94: mod_base = um
  modified_base 95: mod_base = gm
  modified_base 96: mod_base = cm
  modified_base 112: mod_base = OTHER; note = Phosphorothioate (PS) linkage
  modified_base 112: mod_base = gm
  modified_base 113: mod_base = OTHER; note = Phosphorothioate (PS) linkage
  modified_base 113: mod_base = um
  modified_base 114: mod_base = OTHER; note = Phosphorothioate (PS) linkage
  modified_base 114: mod_base = um
  source 1..114: mol_type = other RNA

SEQ ID NO: 413 - RNA, 113 nt, synthetic construct; identical to SEQ ID NO: 324
  modified_base 1: mod_base = um
  modified_base 2: mod_base = OTHER; note = Phosphorothioate (PS) linkage
  modified_base 2: mod_base = OTHER; note = 2'-O-methyladenosine
  modified_base 3: mod_base = OTHER; note = Phosphorothioate (PS) linkage
  modified_base 3: mod_base = gm
  modified_base 4: mod_base = OTHER; note = Phosphorothioate (PS) linkage
  modified_base 29: mod_base = gm
  modified_base 30: mod_base = cm
  modified_base 31: mod_base = um
  modified_base 32: mod_base = OTHER; note = 2'-O-methyladenosine
  modified_base 33: mod_base = gm
  modified_base 34: mod_base = OTHER; note = 2'-O-methyladenosine
  modified_base 35: mod_base = OTHER; note = 2'-O-methyladenosine
  modified_base 36: mod_base = OTHER; note = 2'-O-methyladenosine
  modified_base 37: mod_base = um
  modified_base 38: mod_base = OTHER; note = 2'-O-methyladenosine
  modified_base 39: mod_base = gm
  modified_base 40: mod_base = cm
  modified_base 68: mod_base = OTHER; note = 2'-O-methyladenosine
  modified_base 69: mod_base = OTHER; note = 2'-O-methyladenosine
  modified_base 70: mod_base = cm
  modified_base 71: mod_base = um
  modified_base 72: mod_base = um
  modified_base 73: mod_base = gm
  modified_base 74: mod_base = OTHER; note = 2'-O-methyladenosine
  modified_base 75: mod_base = OTHER; note = 2'-O-methyladenosine
  modified_base 76: mod_base = OTHER; note = 2'-O-methyladenosine
  modified_base 77: mod_base = OTHER; note = 2'-O-methyladenosine
  modified_base 78: mod_base = OTHER; note = 2'-O-methyladenosine
  modified_base 79: mod_base = gm
  modified_base 80: mod_base = um
  modified_base 81: mod_base = gm
  modified_base 82: mod_base = gm
  modified_base 83: mod_base = cm
  modified_base 84: mod_base = OTHER; note = 2'-O-methyladenosine
  modified_base 85: mod_base = cm
  modified_base 86: mod_base = cm
  modified_base 87: mod_base = gm
  modified_base 88: mod_base = OTHER; note = 2'-O-methyladenosine
  modified_base 89: mod_base = gm
  modified_base 90: mod_base = um
  modified_base 91: mod_base = cm
  modified_base 92: mod_base = gm
  modified_base 93: mod_base = gm
  modified_base 94: mod_base = um
  modified_base 95: mod_base = gm
  modified_base 96: mod_base = cm
  modified_base 111: mod_base = OTHER; note = Phosphorothioate (PS) linkage
  modified_base 111: mod_base = OTHER; note = 2'-O-methyladenosine
  modified_base 112: mod_base = OTHER; note = Phosphorothioate (PS) linkage
  modified_base 112: mod_base = gm
  modified_base 113: mod_base = OTHER; note = Phosphorothioate (PS) linkage
  modified_base 113: mod_base = um
  source 1..113: mol_type = other RNA

SEQ ID NO: 414 - RNA, 112 nt, synthetic construct; identical to SEQ ID NO: 325
  modified_base 1: mod_base = um
  modified_base 2: mod_base = OTHER; note = Phosphorothioate (PS) linkage
  modified_base 2: mod_base = OTHER; note = 2'-O-methyladenosine
  modified_base 3: mod_base = OTHER; note = Phosphorothioate (PS) linkage
  modified_base 3: mod_base = gm
  modified_base 4: mod_base = OTHER; note = Phosphorothioate (PS) linkage
  modified_base 29: mod_base = gm
  modified_base 30: mod_base = cm
  modified_base 31: mod_base = um
  modified_base 32: mod_base = OTHER; note = 2'-O-methyladenosine
  modified_base 33: mod_base = gm
  modified_base 34: mod_base = OTHER; note = 2'-O-methyladenosine
  modified_base 35: mod_base = OTHER; note = 2'-O-methyladenosine
  modified_base 36: mod_base = OTHER; note = 2'-O-methyladenosine
  modified_base 37: mod_base = um
  modified_base 38: mod_base = OTHER; note = 2'-O-methyladenosine
  modified_base 39: mod_base = gm
  modified_base 40: mod_base = cm
  modified_base 68: mod_base = OTHER; note = 2'-O-methyladenosine
  modified_base 69: mod_base = OTHER; note = 2'-O-methyladenosine
  modified_base 70: mod_base = cm
  modified_base 71: mod_base = um
  modified_base 72: mod_base = um
  modified_base 73: mod_base = gm
  modified_base 74: mod_base = OTHER; note = 2'-O-methyladenosine
  modified_base 75: mod_base = OTHER; note = 2'-O-methyladenosine
  modified_base 76: mod_base = OTHER; note = 2'-O-methyladenosine
  modified_base 77: mod_base = OTHER; note = 2'-O-methyladenosine
  modified_base 78: mod_base = OTHER; note = 2'-O-methyladenosine
  modified_base 79: mod_base = gm
  modified_base 80: mod_base = um
  modified_base 81: mod_base = gm
  modified_base 82: mod_base = gm
  modified_base 83: mod_base = cm
  modified_base 84: mod_base = OTHER; note = 2'-O-methyladenosine
  modified_base 85: mod_base = cm
  modified_base 86: mod_base = cm
  modified_base 87: mod_base = gm
  modified_base 88: mod_base = OTHER; note = 2'-O-methyladenosine
  modified_base 89: mod_base = gm
  modified_base 90: mod_base = um
  modified_base 91: mod_base = cm
  modified_base 92: mod_base = gm
  modified_base 93: mod_base = gm
  modified_base 94: mod_base = um
  modified_base 95: mod_base = gm
  modified_base 96: mod_base = cm
  modified_base 110: mod_base = OTHER; note = Phosphorothioate (PS) linkage
  modified_base 110: mod_base = cm
  modified_base 111: mod_base = OTHER; note = Phosphorothioate (PS) linkage
  modified_base 111: mod_base = OTHER; note = 2'-O-methyladenosine
  modified_base 112: mod_base = OTHER; note = Phosphorothioate (PS) linkage
  modified_base 112: mod_base = gm
  source 1..112: mol_type = other RNA

SEQ ID NO: 415 - RNA, 111 nt, synthetic construct; identical to SEQ ID NO: 326
  modified_base 1: mod_base = um
  modified_base 2: mod_base = OTHER; note = Phosphorothioate (PS) linkage
  modified_base 2: mod_base = OTHER; note = 2'-O-methyladenosine
  modified_base 3: mod_base = OTHER; note = Phosphorothioate (PS) linkage
  modified_base 3: mod_base = gm
  modified_base 4: mod_base = OTHER; note = Phosphorothioate (PS) linkage
  modified_base 29: mod_base = gm
  modified_base 30: mod_base = cm
  modified_base 31: mod_base = um
  modified_base 32: mod_base = OTHER; note = 2'-O-methyladenosine
  modified_base 33: mod_base = gm
  modified_base 34: mod_base = OTHER; note = 2'-O-methyladenosine
  modified_base 35: mod_base = OTHER; note = 2'-O-methyladenosine
  modified_base 36: mod_base = OTHER; note = 2'-O-methyladenosine
  modified_base 37: mod_base = um
  modified_base 38: mod_base = OTHER; note = 2'-O-methyladenosine
  modified_base 39: mod_base = gm
  modified_base 40: mod_base = cm
  modified_base 68: mod_base = OTHER; note = 2'-O-methyladenosine
  modified_base 69: mod_base = OTHER; note = 2'-O-methyladenosine
  modified_base 70: mod_base = cm
  modified_base 71: mod_base = um
  modified_base 72: mod_base = um
  modified_base 73: mod_base = gm
  modified_base 74: mod_base = OTHER; note = 2'-O-methyladenosine
  modified_base 75: mod_base = OTHER; note = 2'-O-methyladenosine
  modified_base 76: mod_base = OTHER; note = 2'-O-methyladenosine
  modified_base 77: mod_base = OTHER; note = 2'-O-methyladenosine
  modified_base 78: mod_base = OTHER; note = 2'-O-methyladenosine
  modified_base 79: mod_base = gm
  modified_base 80: mod_base = um
  modified_base 81: mod_base = gm
  modified_base 82: mod_base = gm
  modified_base 83: mod_base = cm
  modified_base 84: mod_base = OTHER; note = 2'-O-methyladenosine
  modified_base 85: mod_base = cm
  modified_base 86: mod_base = cm
  modified_base 87: mod_base = gm
  modified_base 88: mod_base = OTHER; note = 2'-O-methyladenosine
  modified_base 89: mod_base = gm
  modified_base 90: mod_base = um
  modified_base 91: mod_base = cm
  modified_base 92: mod_base = gm
  modified_base 93: mod_base = gm
  modified_base 94: mod_base = um
  modified_base 95: mod_base = gm
  modified_base 96: mod_base = cm
  modified_base 109: mod_base = OTHER; note = Phosphorothioate (PS) linkage
  modified_base 109: mod_base = um
  modified_base 110: mod_base = OTHER; note = Phosphorothioate (PS) linkage
  modified_base 110: mod_base = cm
  modified_base 111: mod_base = OTHER; note = Phosphorothioate (PS) linkage
  modified_base 111: mod_base = OTHER; note = 2'-O-methyladenosine
  source 1..111: mol_type = other RNA

SEQ ID NO: 416 - RNA, 110 nt, synthetic construct; identical to SEQ ID NO: 327
  modified_base 1: mod_base = um
  modified_base 2: mod_base = OTHER; note = Phosphorothioate (PS) linkage
  modified_base 2: mod_base = OTHER; note = 2'-O-methyladenosine
  modified_base 3: mod_base = OTHER; note = Phosphorothioate (PS) linkage
  modified_base 3: mod_base = gm
  modified_base 4: mod_base = OTHER; note = Phosphorothioate (PS) linkage
  modified_base 29: mod_base = gm
  modified_base 30: mod_base = cm
  modified_base 31: mod_base = um
  modified_base 32: mod_base = OTHER; note = 2'-O-methyladenosine
  modified_base 33: mod_base = gm
  modified_base 34: mod_base = OTHER; note = 2'-O-methyladenosine
  modified_base 35: mod_base = OTHER; note = 2'-O-methyladenosine
  modified_base 36: mod_base = OTHER; note = 2'-O-methyladenosine
  modified_base 37: mod_base = um
  modified_base 38: mod_base = OTHER; note = 2'-O-methyladenosine
  modified_base 39: mod_base = gm
  modified_base 40: mod_base = cm
  modified_base 68: mod_base = OTHER; note = 2'-O-methyladenosine
  modified_base 69: mod_base = OTHER; note = 2'-O-methyladenosine
  modified_base 70: mod_base = cm
  modified_base 71: mod_base = um
  modified_base 72: mod_base = um
  modified_base 73: mod_base = gm
  modified_base 74: mod_base = OTHER; note = 2'-O-methyladenosine
  modified_base 75: mod_base = OTHER; note = 2'-O-methyladenosine
  modified_base 76: mod_base = OTHER; note = 2'-O-methyladenosine
  modified_base 77: mod_base = OTHER; note = 2'-O-methyladenosine
  modified_base 78: mod_base = OTHER; note = 2'-O-methyladenosine
  modified_base 79: mod_base = gm
  modified_base 80: mod_base = um
  modified_base 81: mod_base = gm
  modified_base 82: mod_base = gm
  modified_base 83: mod_base = cm
  modified_base 84: mod_base = OTHER; note = 2'-O-methyladenosine
  modified_base 85: mod_base = cm
  modified_base 86: mod_base = cm
  modified_base 87: mod_base = gm
  modified_base 88: mod_base = OTHER; note = 2'-O-methyladenosine
  modified_base 89: mod_base = gm
  modified_base 90: mod_base = um
  modified_base 91: mod_base = cm
  modified_base 92: mod_base = gm
  modified_base 93: mod_base = gm
  modified_base 94: mod_base = um
  modified_base 95: mod_base = gm
  modified_base 96: mod_base = cm
  modified_base 108: mod_base = OTHER; note = Phosphorothioate (PS) linkage
  modified_base 108: mod_base = cm
  modified_base 109: mod_base = OTHER; note = Phosphorothioate (PS) linkage
  modified_base 109: mod_base = um
  modified_base 110: mod_base = OTHER; note = Phosphorothioate (PS) linkage
  modified_base 110: mod_base = cm
  source 1..110: mol_type = other RNA

SEQ ID NO: 417 - RNA, 109 nt, synthetic construct; identical to SEQ ID NO: 328
  modified_base 1: mod_base = um
  modified_base 2: mod_base = OTHER; note = Phosphorothioate (PS) linkage
  modified_base 2: mod_base = OTHER; note = 2'-O-methyladenosine
  modified_base 3: mod_base = OTHER; note = Phosphorothioate (PS) linkage
  modified_base 3: mod_base = gm
  modified_base 4: mod_base = OTHER; note = Phosphorothioate (PS) linkage
  modified_base 29: mod_base = gm
  modified_base 30: mod_base = cm
  modified_base 31: mod_base = um
  modified_base 32: mod_base = OTHER; note = 2'-O-methyladenosine
  modified_base 33: mod_base = gm
  modified_base 34: mod_base = OTHER; note = 2'-O-methyladenosine
  modified_base 35: mod_base = OTHER; note = 2'-O-methyladenosine
  modified_base 36: mod_base = OTHER; note = 2'-O-methyladenosine
  modified_base 37: mod_base = um
  modified_base 38: mod_base = OTHER; note = 2'-O-methyladenosine
  modified_base 39: mod_base = gm
  modified_base 40: mod_base = cm
  modified_base 68: mod_base = OTHER; note = 2'-O-methyladenosine
  modified_base 69: mod_base = OTHER; note = 2'-O-methyladenosine
  modified_base 70: mod_base = cm
  modified_base 71: mod_base = um
  modified_base 72: mod_base = um
  modified_base 73: mod_base = gm
  modified_base 74: mod_base = OTHER; note = 2'-O-methyladenosine
  modified_base 75: mod_base = OTHER; note = 2'-O-methyladenosine
  modified_base 76: mod_base = OTHER; note = 2'-O-methyladenosine
  modified_base 77: mod_base = OTHER; note = 2'-O-methyladenosine
  modified_base 78: mod_base = OTHER; note = 2'-O-methyladenosine
  modified_base 79: mod_base = gm
  modified_base 80: mod_base = um
  modified_base 81: mod_base = gm
  modified_base 82: mod_base = gm
  modified_base 83: mod_base = cm
  modified_base 84: mod_base = OTHER; note = 2'-O-methyladenosine
  modified_base 85: mod_base = cm
  modified_base 86: mod_base = cm
  modified_base 87: mod_base = gm
  modified_base 88: mod_base = OTHER; note = 2'-O-methyladenosine
  modified_base 89: mod_base = gm
  modified_base 90: mod_base = um
  modified_base 91: mod_base = cm
  modified_base 92: mod_base = gm
  modified_base 93: mod_base = gm
  modified_base 94: mod_base = um
  modified_base 95: mod_base = gm
  modified_base 96: mod_base = cm
  modified_base 107: mod_base = OTHER; note = Phosphorothioate (PS) linkage
  modified_base 107: mod_base = um
  modified_base 108: mod_base = OTHER; note = Phosphorothioate (PS) linkage
  modified_base 108: mod_base = cm
  modified_base 109: mod_base = OTHER; note = Phosphorothioate (PS) linkage
  modified_base 109: mod_base = um
  source 1..109: mol_type = other RNA

SEQ ID NO: 418 - RNA, 119 nt, synthetic construct; identical to SEQ ID NO: 329
  modified_base 1: mod_base = um
  modified_base 2: mod_base = OTHER; note = Phosphorothioate (PS) linkage
  modified_base 2: mod_base = OTHER; note = 2'-O-methyladenosine
  modified_base 3: mod_base = OTHER; note = Phosphorothioate (PS) linkage
  modified_base 3: mod_base = gm
  modified_base 4: mod_base = OTHER; note = Phosphorothioate (PS) linkage
  modified_base 29: mod_base = gm
  modified_base 30: mod_base = cm
  modified_base 31: mod_base = um
  modified_base 32: mod_base = OTHER; note = 2'-O-methyladenosine
  modified_base 33: mod_base = gm
  modified_base 34: mod_base = OTHER; note = 2'-O-methyladenosine
  modified_base 35: mod_base = OTHER; note = 2'-O-methyladenosine
  modified_base 36: mod_base = OTHER; note = 2'-O-methyladenosine
  modified_base 37: mod_base = um
  modified_base 38: mod_base = OTHER; note = 2'-O-methyladenosine
  modified_base 39: mod_base = gm
  modified_base 40: mod_base = cm
  modified_base 68: mod_base = OTHER; note = 2'-O-methyladenosine
  modified_base 69: mod_base = OTHER; note = 2'-O-methyladenosine
  modified_base 70: mod_base = cm
  modified_base 71: mod_base = um
  modified_base 72: mod_base = um
  modified_base 73: mod_base = gm
  modified_base 74: mod_base = OTHER; note = 2'-O-methyladenosine
  modified_base 75: mod_base = OTHER; note = 2'-O-methyladenosine
  modified_base 76: mod_base = OTHER; note = 2'-O-methyladenosine
  modified_base 77: mod_base = OTHER; note = 2'-O-methyladenosine
  modified_base 78: mod_base = OTHER; note = 2'-O-methyladenosine
  modified_base 79: mod_base = gm
  modified_base 80: mod_base = um
  modified_base 81: mod_base = gm
  modified_base 82: mod_base = gm
  modified_base 83: mod_base = cm
  modified_base 84: mod_base = OTHER; note = 2'-O-methyladenosine
  modified_base 85: mod_base = cm
  modified_base 86: mod_base = cm
  modified_base 87: mod_base = gm
  modified_base 88: mod_base = OTHER; note = 2'-O-methyladenosine
  modified_base 89: mod_base = gm
  modified_base 90: mod_base = um
  modified_base 91: mod_base = cm
  modified_base 92: mod_base = gm
  modified_base 93: mod_base = gm
  modified_base 94: mod_base = um
  modified_base 95: mod_base = gm
  modified_base 96: mod_base = cm
  modified_base 117: mod_base = OTHER; note = Phosphorothioate (PS) linkage
  modified_base 117: mod_base = cm
  modified_base 118: mod_base = OTHER; note = Phosphorothioate (PS) linkage
  modified_base 118: mod_base = gm
  modified_base 119: mod_base = OTHER; note = Phosphorothioate (PS) linkage
  modified_base 119: mod_base = cm
  source 1..119: mol_type = other RNA

SEQ ID NO: 419 - RNA, 118 nt, synthetic construct; identical to SEQ ID NO: 330
  modified_base 1: mod_base = um
  modified_base 2: mod_base = OTHER; note = Phosphorothioate (PS) linkage
  modified_base 2: mod_base = OTHER; note = 2'-O-methyladenosine
  modified_base 3: mod_base = OTHER; note = Phosphorothioate (PS) linkage
  modified_base 3: mod_base = gm
  modified_base 4: mod_base = OTHER; note = Phosphorothioate (PS) linkage
  modified_base 29: mod_base = gm
  modified_base 30: mod_base = cm
  modified_base 31: mod_base = um
  modified_base 32: mod_base = OTHER; note = 2'-O-methyladenosine
  modified_base 33: mod_base = gm
  modified_base 34: mod_base = OTHER; note = 2'-O-methyladenosine
  modified_base 35: mod_base = OTHER; note = 2'-O-methyladenosine
  modified_base 36: mod_base = OTHER; note = 2'-O-methyladenosine
  modified_base 37: mod_base = um
  modified_base 38: mod_base = OTHER; note = 2'-O-methyladenosine
  modified_base 39: mod_base = gm
  modified_base 40: mod_base = cm
  modified_base 68: mod_base = OTHER; note = 2'-O-methyladenosine
  modified_base 69: mod_base = OTHER; note = 2'-O-methyladenosine
  modified_base 70: mod_base = cm
  modified_base 71: mod_base = um
  modified_base 72: mod_base = um
  modified_base 73: mod_base = gm
  modified_base 74: mod_base = OTHER; note = 2'-O-methyladenosine
  modified_base 75: mod_base = OTHER; note = 2'-O-methyladenosine
  modified_base 76: mod_base = OTHER; note = 2'-O-methyladenosine
  modified_base 77: mod_base = OTHER; note = 2'-O-methyladenosine
  modified_base 78: mod_base = OTHER; note = 2'-O-methyladenosine
  modified_base 79: mod_base = gm
  modified_base 80: mod_base = um
  modified_base 81: mod_base = gm
  modified_base 82: mod_base = gm
  modified_base 83: mod_base = cm
  modified_base 84: mod_base = OTHER; note = 2'-O-methyladenosine
  modified_base 85: mod_base = cm
  modified_base 86: mod_base = cm
  modified_base 87: mod_base = gm
  modified_base 88: mod_base = OTHER; note = 2'-O-methyladenosine
  modified_base 89: mod_base = gm
  modified_base 90: mod_base = um
  modified_base 91: mod_base = cm
  modified_base 92: mod_base = gm
  modified_base 93: mod_base = gm
  modified_base 94: mod_base = um
  modified_base 95: mod_base = gm
  modified_base 96: mod_base = cm
  modified_base 116: mod_base = OTHER; note = Phosphorothioate (PS) linkage
  modified_base 116: mod_base = um
  modified_base 117: mod_base = OTHER; note = Phosphorothioate (PS) linkage
  modified_base 117: mod_base = cm
  modified_base 118: mod_base = OTHER; note = Phosphorothioate (PS) linkage
  modified_base 118: mod_base = gm
  source 1..118: mol_type = other RNA

SEQ ID NO: 420 - RNA, 117 nt, synthetic construct; identical to SEQ ID NO: 331
  modified_base 1: mod_base = um
  modified_base 2: mod_base = OTHER; note = Phosphorothioate (PS) linkage
  modified_base 2: mod_base = OTHER; note = 2'-O-methyladenosine
  modified_base 3: mod_base = OTHER; note = Phosphorothioate (PS) linkage
  modified_base 3: mod_base = gm
  modified_base 4: mod_base = OTHER; note = Phosphorothioate (PS) linkage
  modified_base 29: mod_base = gm
  modified_base 30: mod_base = cm
  modified_base 31: mod_base = um
  modified_base 32: mod_base = OTHER; note = 2'-O-methyladenosine
  modified_base 33: mod_base = gm
  modified_base 34: mod_base = OTHER; note = 2'-O-methyladenosine
  modified_base 35: mod_base = OTHER; note = 2'-O-methyladenosine
  modified_base 36: mod_base = OTHER; note = 2'-O-methyladenosine
  modified_base 37: mod_base = um
  modified_base 38: mod_base = OTHER; note = 2'-O-methyladenosine
  modified_base 39: mod_base = gm
  modified_base 40: mod_base = cm
  modified_base 68: mod_base = OTHER; note = 2'-O-methyladenosine
  modified_base 69: mod_base = OTHER; note = 2'-O-methyladenosine
  modified_base 70: mod_base = cm
  modified_base 71: mod_base = um
  modified_base 72: mod_base = um
  modified_base 73: mod_base = gm
  modified_base 74: mod_base = OTHER; note = 2'-O-methyladenosine
  modified_base 75: mod_base = OTHER; note = 2'-O-methyladenosine
  modified_base 76: mod_base = OTHER; note = 2'-O-methyladenosine
  modified_base 77: mod_base = OTHER; note = 2'-O-methyladenosine
  modified_base 78: mod_base = OTHER; note = 2'-O-methyladenosine
  modified_base 79: mod_base = gm
  modified_base 80: mod_base = um
  modified_base 81: mod_base = gm
  modified_base 82: mod_base = gm
  modified_base 83: mod_base = cm
  modified_base 84: mod_base = OTHER; note = 2'-O-methyladenosine
  modified_base 85: mod_base = cm
  modified_base 86: mod_base = cm
  modified_base 87: mod_base = gm
  modified_base 88: mod_base = OTHER; note = 2'-O-methyladenosine
  modified_base 89: mod_base = gm
  modified_base 90: mod_base = um
  modified_base 91: mod_base = cm
  modified_base 92: mod_base = gm
  modified_base 93: mod_base = gm
  modified_base 94: mod_base = um
  modified_base 95: mod_base = gm
  modified_base 96: mod_base = cm
  modified_base 115: mod_base = OTHER; note = Phosphorothioate (PS) linkage
  modified_base 115: mod_base = um
  modified_base 116: mod_base = OTHER; note = Phosphorothioate (PS) linkage
  modified_base 116: mod_base = um
  modified_base 117: mod_base = OTHER; note = Phosphorothioate (PS) linkage
  modified_base 117: mod_base = cm
  source 1..117: mol_type = other RNA

SEQ ID NO: 421 - RNA, 116 nt, synthetic construct; identical to SEQ ID NO: 332
  modified_base 1: mod_base = um
  modified_base 2: mod_base = OTHER; note = Phosphorothioate (PS) linkage
  modified_base 2: mod_base = OTHER; note = 2'-O-methyladenosine
  modified_base 3: mod_base = OTHER; note = Phosphorothioate (PS) linkage
  modified_base 3: mod_base = gm
  modified_base 4: mod_base = OTHER; note = Phosphorothioate (PS) linkage
  modified_base 29: mod_base = gm
  modified_base 30: mod_base = cm
  modified_base 31: mod_base = um
  modified_base 32: mod_base = OTHER; note = 2'-O-methyladenosine
  modified_base 33: mod_base = gm
  modified_base 34: mod_base = OTHER; note = 2'-O-methyladenosine
  modified_base 35: mod_base = OTHER; note = 2'-O-methyladenosine
  modified_base 36: mod_base = OTHER; note = 2'-O-methyladenosine
  modified_base 37: mod_base = um
  modified_base 38: mod_base = OTHER; note = 2'-O-methyladenosine
  modified_base 39: mod_base = gm
  modified_base 40: mod_base = cm
  modified_base 68: mod_base = OTHER; note = 2'-O-methyladenosine
  modified_base 69: mod_base = OTHER; note = 2'-O-methyladenosine
  modified_base 70: mod_base = cm
  modified_base 71: mod_base = um
  modified_base 72: mod_base = um
  modified_base 73: mod_base = gm
  modified_base 74: mod_base = OTHER; note = 2'-O-methyladenosine
  modified_base 75: mod_base = OTHER; note = 2'-O-methyladenosine
  modified_base 76: mod_base = OTHER; note = 2'-O-methyladenosine
  modified_base 77: mod_base = OTHER; note = 2'-O-methyladenosine
  modified_base 78: mod_base = OTHER; note = 2'-O-methyladenosine
  modified_base 79: mod_base = gm
  modified_base 80: mod_base = um
  modified_base 81: mod_base = gm
  modified_base 82: mod_base = gm
  modified_base 83: mod_base = cm
  modified_base 84: mod_base = OTHER; note = 2'-O-methyladenosine
  modified_base 85: mod_base = cm
  modified_base 86: mod_base = cm
  modified_base 87: mod_base = gm
  modified_base 88: mod_base = OTHER; note = 2'-O-methyladenosine
  modified_base 89: mod_base = gm
  modified_base 90: mod_base = um
  modified_base 91: mod_base = cm
  modified_base 92: mod_base = gm
  modified_base 93: mod_base = gm
  modified_base 94: mod_base = um
  modified_base 95: mod_base = gm
  modified_base 96: mod_base = cm
  modified_base 114: mod_base = OTHER; note = Phosphorothioate (PS) linkage
  modified_base 114: mod_base = gm
  modified_base 115: mod_base = OTHER; note = Phosphorothioate (PS) linkage
  modified_base 115: mod_base = um
  modified_base 116: mod_base = OTHER; note = Phosphorothioate (PS) linkage
  modified_base 116: mod_base = um
  source 1..116: mol_type = other RNA

SEQ ID NO: 422 - RNA, 115 nt, synthetic construct; identical to SEQ ID NO: 333
  modified_base 1: mod_base = um
  modified_base 2: mod_base = OTHER; note = Phosphorothioate (PS) linkage
  modified_base 2: mod_base = OTHER; note = 2'-O-methyladenosine
  modified_base 3: mod_base = OTHER; note = Phosphorothioate (PS) linkage
  modified_base 3: mod_base = gm
  modified_base 4: mod_base = OTHER; note = Phosphorothioate (PS) linkage
  modified_base 29: mod_base = gm
  modified_base 30: mod_base = cm
  modified_base 31: mod_base = um
  modified_base 32: mod_base = OTHER; note = 2'-O-methyladenosine
  modified_base 33: mod_base = gm
  modified_base 34: mod_base = OTHER; note = 2'-O-methyladenosine
  modified_base 35: mod_base = OTHER; note = 2'-O-methyladenosine
  modified_base 36: mod_base = OTHER; note = 2'-O-methyladenosine
  modified_base 37: mod_base = um
  modified_base 38: mod_base = OTHER; note = 2'-O-methyladenosine
  modified_base 39: mod_base = gm
  modified_base 40: mod_base = cm
  modified_base 68: mod_base = OTHER; note = 2'-O-methyladenosine
  modified_base 69: mod_base = OTHER; note = 2'-O-methyladenosine
  modified_base 70: mod_base = cm
  modified_base 71: mod_base = um
  modified_base 72: mod_base = um
  modified_base 73: mod_base = gm
  modified_base 74: mod_base = OTHER; note = 2'-O-methyladenosine
  modified_base 75: mod_base = OTHER; note = 2'-O-methyladenosine
  modified_base 76: mod_base = OTHER; note = 2'-O-methyladenosine
  modified_base 77: mod_base = OTHER; note = 2'-O-methyladenosine
  modified_base 78: mod_base = OTHER; note = 2'-O-methyladenosine
  modified_base 79: mod_base = gm
  modified_base 80: mod_base = um
  modified_base 81: mod_base = gm
  modified_base 82: mod_base = gm
  modified_base 83: mod_base = cm
  modified_base 84: mod_base = OTHER; note = 2'-O-methyladenosine
  modified_base 85: mod_base = cm
  modified_base 86: mod_base = cm
  modified_base 87: mod_base = gm
  modified_base 88: mod_base = OTHER; note = 2'-O-methyladenosine
  modified_base 89: mod_base = gm
  modified_base 90: mod_base = um
  modified_base 91: mod_base = cm
  modified_base 92: mod_base = gm
  modified_base 93: mod_base = gm
  modified_base 94: mod_base = um
  modified_base 95: mod_base = gm
  modified_base 96: mod_base = cm
  modified_base 113: mod_base = OTHER; note = Phosphorothioate (PS) linkage
  modified_base 113: mod_base = OTHER; note = 2'-O-methyladenosine
  modified_base 114: mod_base = OTHER; note = Phosphorothioate (PS) linkage
  modified_base 114: mod_base = gm
  modified_base 115: mod_base = OTHER; note = Phosphorothioate (PS) linkage
  modified_base 115: mod_base = um
  source 1..115: mol_type = other RNA

SEQ ID NO: 423 - RNA, 114 nt, synthetic construct; identical to SEQ ID NO: 334
  modified_base 1: mod_base = um
  modified_base 2: mod_base = OTHER; note = Phosphorothioate (PS) linkage
  modified_base 2: mod_base = OTHER; note = 2'-O-methyladenosine
  modified_base 3: mod_base = OTHER; note = Phosphorothioate (PS) linkage
  modified_base 3: mod_base = gm
  modified_base 4: mod_base = OTHER; note = Phosphorothioate (PS) linkage
  modified_base 29: mod_base = gm
  modified_base 30: mod_base = cm
  modified_base 31: mod_base = um
  modified_base 32: mod_base = OTHER; note = 2'-O-methyladenosine
  modified_base 33: mod_base = gm
  modified_base 34: mod_base = OTHER; note = 2'-O-methyladenosine
  modified_base 35: mod_base = OTHER; note = 2'-O-methyladenosine
  modified_base 36: mod_base = OTHER; note = 2'-O-methyladenosine
  modified_base 37: mod_base = um
  modified_base 38: mod_base = OTHER; note = 2'-O-methyladenosine
  modified_base 39: mod_base = gm
  modified_base 40: mod_base = cm
  modified_base 68: mod_base = OTHER; note = 2'-O-methyladenosine
  modified_base 69: mod_base = OTHER; note = 2'-O-methyladenosine
  modified_base 70: mod_base = cm
  modified_base 71: mod_base = um
  modified_base 72: mod_base = um
  modified_base 73: mod_base = gm
  modified_base 74: mod_base = OTHER; note = 2'-O-methyladenosine
  modified_base 75: mod_base = OTHER; note = 2'-O-methyladenosine
  modified_base 76: mod_base = OTHER; note = 2'-O-methyladenosine
  modified_base 77: mod_base = OTHER; note = 2'-O-methyladenosine
  modified_base 78: mod_base = OTHER; note = 2'-O-methyladenosine
  modified_base 79: mod_base = gm
  modified_base 80: mod_base = um
  modified_base 81: mod_base = gm
  modified_base 82: mod_base = gm
  modified_base 83: mod_base = cm
  modified_base 84: mod_base = OTHER; note = 2'-O-methyladenosine
  modified_base 85: mod_base = cm
  modified_base 86: mod_base = cm
  modified_base 87: mod_base = gm
  modified_base 88: mod_base = OTHER; note = 2'-O-methyladenosine
  modified_base 89: mod_base = gm
  modified_base 90: mod_base = um
  modified_base 91: mod_base = cm
  modified_base 92: mod_base = gm
  modified_base 93: mod_base = gm
  modified_base 94: mod_base = um
  modified_base 95: mod_base = gm
  modified_base 96: mod_base = cm
  modified_base 112: mod_base = OTHER; note = Phosphorothioate (PS) linkage
  modified_base 112: mod_base = cm
  modified_base 113: mod_base = OTHER; note = Phosphorothioate (PS) linkage
  modified_base 113: mod_base = OTHER; note = 2'-O-methyladenosine
  modified_base 114: mod_base = OTHER; note = Phosphorothioate (PS) linkage
  modified_base 114: mod_base = gm
  source 1..114: mol_type = other RNA

SEQ ID NO: 424 - RNA, 113 nt, synthetic construct; identical to SEQ ID NO: 335
  modified_base 1: mod_base = um
  modified_base 2: mod_base = OTHER; note = Phosphorothioate (PS) linkage
  modified_base 2: mod_base = OTHER; note = 2'-O-methyladenosine
  modified_base 3: mod_base = OTHER; note = Phosphorothioate (PS) linkage
  modified_base 3: mod_base = gm
  modified_base 4: mod_base = OTHER; note = Phosphorothioate (PS) linkage
  modified_base 29: mod_base = gm
  modified_base 30: mod_base = cm
  modified_base 31: mod_base = um
  modified_base 32: mod_base = OTHER; note = 2'-O-methyladenosine
  modified_base 33: mod_base = gm
  modified_base 34: mod_base = OTHER; note = 2'-O-methyladenosine
  modified_base 35: mod_base = OTHER; note = 2'-O-methyladenosine
  modified_base 36: mod_base = OTHER; note = 2'-O-methyladenosine
  modified_base 37: mod_base = um
  modified_base 38: mod_base = OTHER; note = 2'-O-methyladenosine
  modified_base 39: mod_base = gm
  modified_base 40: mod_base = cm
  modified_base 68: mod_base = OTHER; note = 2'-O-methyladenosine
  modified_base 69: mod_base = OTHER; note = 2'-O-methyladenosine
  modified_base 70: mod_base = cm
  modified_base 71: mod_base = um
  modified_base 72: mod_base = um
  modified_base 73: mod_base = gm
  modified_base 74: mod_base = OTHER; note = 2'-O-methyladenosine
  modified_base 75: mod_base = OTHER; note = 2'-O-methyladenosine
  modified_base 76: mod_base = OTHER; note = 2'-O-methyladenosine
  modified_base 77: mod_base = OTHER; note = 2'-O-methyladenosine
  modified_base 78: mod_base = OTHER; note = 2'-O-methyladenosine
  modified_base 79: mod_base = gm
  modified_base 80: mod_base = um
  modified_base 81: mod_base = gm
  modified_base 82: mod_base = gm
  modified_base 83: mod_base = cm
  modified_base 84: mod_base = OTHER; note = 2'-O-methyladenosine
  modified_base 85: mod_base = cm
  modified_base 86: mod_base = cm
  modified_base 87: mod_base = gm
  modified_base 88: mod_base = OTHER; note = 2'-O-methyladenosine
  modified_base 89: mod_base = gm
  modified_base 90: mod_base = um
  modified_base 91: mod_base = cm
  modified_base 92: mod_base = gm
  modified_base 93: mod_base = gm
  modified_base 94: mod_base = um
  modified_base 95: mod_base = gm
  modified_base 96: mod_base = cm
  modified_base 111: mod_base = OTHER; note = Phosphorothioate (PS) linkage
  modified_base 111: mod_base = um
  modified_base 112: mod_base = OTHER; note = Phosphorothioate (PS) linkage
  modified_base 112: mod_base = cm
  modified_base 113: mod_base = OTHER; note = Phosphorothioate (PS) linkage
  modified_base 113: mod_base = OTHER; note = 2'-O-methyladenosine
  source 1..113: mol_type = other RNA

SEQ ID NO: 425 - RNA, 112 nt, synthetic construct; identical to SEQ ID NO: 336
  modified_base 1: mod_base = um
  modified_base 2: mod_base = OTHER; note = Phosphorothioate (PS) linkage
  modified_base 2: mod_base = OTHER; note = 2'-O-methyladenosine
  modified_base 3: mod_base = OTHER; note = Phosphorothioate (PS) linkage
  modified_base 3: mod_base = gm
  modified_base 4: mod_base = OTHER; note = Phosphorothioate (PS) linkage
  modified_base 29: mod_base = gm
  modified_base 30: mod_base = cm
  modified_base 31: mod_base = um
  modified_base 32: mod_base = OTHER; note = 2'-O-methyladenosine
  modified_base 33: mod_base = gm
  modified_base 34: mod_base = OTHER; note = 2'-O-methyladenosine
  modified_base 35: mod_base = OTHER; note = 2'-O-methyladenosine
  modified_base 36: mod_base = OTHER; note = 2'-O-methyladenosine
  modified_base 37: mod_base = um
  modified_base 38: mod_base = OTHER; note = 2'-O-methyladenosine
  modified_base 39: mod_base = gm
  modified_base 40: mod_base = cm
  modified_base 68: mod_base = OTHER; note = 2'-O-methyladenosine
  modified_base 69: mod_base = OTHER; note = 2'-O-methyladenosine
  modified_base 70: mod_base = cm
  modified_base 71: mod_base = um
  modified_base 72: mod_base = um
  modified_base 73: mod_base = gm
  modified_base 74: mod_base = OTHER; note = 2'-O-methyladenosine
  modified_base 75: mod_base = OTHER; note = 2'-O-methyladenosine
  modified_base 76: mod_base = OTHER; note = 2'-O-methyladenosine
  modified_base 77: mod_base = OTHER; note = 2'-O-methyladenosine
  modified_base 78: mod_base = OTHER; note = 2'-O-methyladenosine
  modified_base 79: mod_base = gm
  modified_base 80: mod_base = um
  modified_base 81: mod_base = gm
  modified_base 82: mod_base = gm
  modified_base 83: mod_base = cm
  modified_base 84: mod_base = OTHER; note = 2'-O-methyladenosine
  modified_base 85: mod_base = cm
  modified_base 86: mod_base = cm
  modified_base 87: mod_base = gm
  modified_base 88: mod_base = OTHER; note = 2'-O-methyladenosine
  modified_base 89: mod_base = gm
  modified_base 90: mod_base = um
  modified_base 91: mod_base = cm
  modified_base 92: mod_base = gm
  modified_base 93: mod_base = gm
  modified_base 94: mod_base = um
  modified_base 95: mod_base = gm
  modified_base 96: mod_base = cm
  modified_base 110: mod_base = OTHER; note = Phosphorothioate (PS) linkage
  modified_base 110: mod_base = cm
  modified_base 111: mod_base = OTHER; note = Phosphorothioate (PS) linkage
  modified_base 111: mod_base = um
  modified_base 112: mod_base = OTHER; note = Phosphorothioate (PS) linkage
  modified_base 112: mod_base = cm
  source 1..112: mol_type = other RNA

SEQ ID NO: 426 - RNA, 111 nt, synthetic construct; identical to SEQ ID NO: 337
  modified_base 1: mod_base = um
  modified_base 2: mod_base = OTHER; note = Phosphorothioate (PS) linkage
  modified_base 2: mod_base = OTHER; note = 2'-O-methyladenosine
  modified_base 3: mod_base = OTHER; note = Phosphorothioate (PS) linkage
  modified_base 3: mod_base = gm
  modified_base 4: mod_base = OTHER; note = Phosphorothioate (PS) linkage
  modified_base 29: mod_base = gm
  modified_base 30: mod_base = cm
  modified_base 31: mod_base = um
  modified_base 32: mod_base = OTHER; note = 2'-O-methyladenosine
  modified_base 33: mod_base = gm
  modified_base 34: mod_base = OTHER; note = 2'-O-methyladenosine
  modified_base 35: mod_base = OTHER; note = 2'-O-methyladenosine
  modified_base 36: mod_base = OTHER; note = 2'-O-methyladenosine
  modified_base 37: mod_base = um
  modified_base 38: mod_base = OTHER; note = 2'-O-methyladenosine
  modified_base 39: mod_base = gm
  modified_base 40: mod_base = cm
  modified_base 68: mod_base = OTHER; note = 2'-O-methyladenosine
  modified_base 69: mod_base = OTHER; note = 2'-O-methyladenosine
  modified_base 70: mod_base = cm
  modified_base 71: mod_base = um
  modified_base 72: mod_base = um
  modified_base 73: mod_base = gm
  modified_base 74: mod_base = OTHER; note = 2'-O-methyladenosine
  modified_base 75: mod_base = OTHER; note = 2'-O-methyladenosine
  modified_base 76: mod_base = OTHER; note = 2'-O-methyladenosine
  modified_base 77: mod_base = OTHER; note = 2'-O-methyladenosine
  modified_base 78: mod_base = OTHER; note = 2'-O-methyladenosine
  modified_base 79: mod_base = gm
  modified_base 80: mod_base = um
  modified_base 81: mod_base = gm
  modified_base 82: mod_base = gm
  modified_base 83: mod_base = cm
  modified_base 84: mod_base = OTHER; note = 2'-O-methyladenosine
  modified_base 85: mod_base = cm
  modified_base 86: mod_base = cm
  modified_base 87: mod_base = gm
  modified_base 88: mod_base = OTHER; note = 2'-O-methyladenosine
  modified_base 89: mod_base = gm
  modified_base 90: mod_base = um
  modified_base 91: mod_base = cm
  modified_base 92: mod_base = gm
  modified_base 93: mod_base = gm
  modified_base 94: mod_base = um
  modified_base 95: mod_base = gm
  modified_base 96: mod_base = cm
  modified_base 109: mod_base = OTHER; note = Phosphorothioate (PS) linkage
  modified_base 109: mod_base = um
  modified_base 110: mod_base = OTHER; note = Phosphorothioate (PS) linkage
  modified_base 110: mod_base = cm
  modified_base 111: mod_base = OTHER; note = Phosphorothioate (PS) linkage
  modified_base 111: mod_base = um
  source 1..111: mol_type = other RNA

SEQ ID NO: 427 - RNA, 121 nt, synthetic construct; identical to SEQ ID NO: 338
  modified_base 1: mod_base = um
  modified_base 2: mod_base = OTHER; note = Phosphorothioate (PS) linkage
  modified_base 2: mod_base = OTHER; note = 2'-O-methyladenosine
  modified_base 3: mod_base = OTHER; note = Phosphorothioate (PS) linkage
  modified_base 3: mod_base = gm
  modified_base 4: mod_base = OTHER; note = Phosphorothioate (PS) linkage
  modified_base 29: mod_base = gm
  modified_base 30: mod_base = cm
  modified_base 31: mod_base = um
  modified_base 32: mod_base = OTHER; note = 2'-O-methyladenosine
  modified_base 33: mod_base = gm
  modified_base 34: mod_base = OTHER; note = 2'-O-methyladenosine
  modified_base 35: mod_base = OTHER; note = 2'-O-methyladenosine
  modified_base 36: mod_base = OTHER; note = 2'-O-methyladenosine
  modified_base 37: mod_base = um
  modified_base 38: mod_base = OTHER; note = 2'-O-methyladenosine
  modified_base 39: mod_base = gm
  modified_base 40: mod_base = cm
  modified_base 68: mod_base = OTHER; note = 2'-O-methyladenosine
  modified_base 69: mod_base = OTHER; note = 2'-O-methyladenosine
  modified_base 70: mod_base = cm
  modified_base 71: mod_base = um
  modified_base 72: mod_base = um
  modified_base 73: mod_base = gm
  modified_base 74: mod_base = OTHER; note = 2'-O-methyladenosine
  modified_base 75: mod_base = OTHER; note = 2'-O-methyladenosine
  modified_base 76: mod_base = OTHER; note = 2'-O-methyladenosine
  modified_base 77: mod_base = OTHER; note = 2'-O-methyladenosine
  modified_base 78: mod_base = OTHER; note = 2'-O-methyladenosine
  modified_base 79: mod_base = gm
  modified_base 80: mod_base = um
  modified_base 81: mod_base = gm
  modified_base 82: mod_base = gm
  modified_base 83: mod_base = cm
  modified_base 84: mod_base = OTHER; note = 2'-O-methyladenosine
  modified_base 85: mod_base = cm
  modified_base 86: mod_base = cm
  modified_base 87: mod_base = gm
  modified_base 88: mod_base = OTHER; note = 2'-O-methyladenosine
  modified_base 89: mod_base = gm
  modified_base 90: mod_base = um
  modified_base 91: mod_base = cm
  modified_base 92: mod_base = gm
  modified_base 93: mod_base = gm
  modified_base 94: mod_base = um
  modified_base 95: mod_base = gm
  modified_base 96: mod_base = cm
  modified_base 119: mod_base = OTHER; note = Phosphorothioate (PS) linkage
  modified_base 119: mod_base = cm
  modified_base 120: mod_base = OTHER; note = Phosphorothioate (PS) linkage
  modified_base 120: mod_base = gm
  modified_base 121: mod_base = OTHER; note = Phosphorothioate (PS) linkage
  modified_base 121: mod_base = cm
  source 1..121: mol_type = other RNA

SEQ ID NO: 428 - RNA, 120 nt, synthetic construct; identical to SEQ ID NO: 339
  modified_base 1: mod_base = um
  modified_base 2: mod_base = OTHER; note = Phosphorothioate (PS) linkage
  modified_base 2: mod_base = OTHER; note = 2'-O-methyladenosine
  modified_base 3: mod_base = OTHER; note = Phosphorothioate (PS) linkage
  modified_base 3: mod_base = gm
  modified_base 4: mod_base = OTHER; note = Phosphorothioate (PS) linkage
  modified_base 29: mod_base = gm
  modified_base 30: mod_base = cm
  modified_base 31: mod_base = um
  modified_base 32: mod_base = OTHER; note = 2'-O-methyladenosine
  modified_base 33: mod_base = gm
  modified_base 34: mod_base = OTHER; note = 2'-O-methyladenosine
  modified_base 35: mod_base = OTHER; note = 2'-O-methyladenosine
  modified_base 36: mod_base = OTHER; note = 2'-O-methyladenosine
  modified_base 37: mod_base = um
  modified_base 38: mod_base = OTHER; note = 2'-O-methyladenosine
  modified_base 39: mod_base = gm
  modified_base 40: mod_base = cm
  modified_base 68: mod_base = OTHER; note = 2'-O-methyladenosine
  modified_base 69: mod_base = OTHER; note = 2'-O-methyladenosine
  modified_base 70: mod_base = cm
  modified_base 71: mod_base = um
  modified_base 72: mod_base = um
  modified_base 73: mod_base = gm
  modified_base 74: mod_base = OTHER; note = 2'-O-methyladenosine
  modified_base 75: mod_base = OTHER; note = 2'-O-methyladenosine
  modified_base 76: mod_base = OTHER; note = 2'-O-methyladenosine
  modified_base 77: mod_base = OTHER; note = 2'-O-methyladenosine
  modified_base 78: mod_base = OTHER; note = 2'-O-methyladenosine
  modified_base 79: mod_base = gm
  modified_base 80: mod_base = um
  modified_base 81: mod_base = gm
  modified_base 82: mod_base = gm
  modified_base 83: mod_base = cm
  modified_base 84: mod_base = OTHER; note = 2'-O-methyladenosine
  modified_base 85: mod_base = cm
  modified_base 86: mod_base = cm
  modified_base 87: mod_base = gm
  modified_base 88: mod_base = OTHER; note = 2'-O-methyladenosine
  modified_base 89: mod_base = gm
  modified_base 90: mod_base = um
  modified_base 91: mod_base = cm
  modified_base 92: mod_base = gm
  modified_base 93: mod_base = gm
  modified_base 94: mod_base = um
  modified_base 95: mod_base = gm
  modified_base 96: mod_base = cm
  modified_base 118: mod_base = OTHER; note = Phosphorothioate (PS) linkage
  modified_base 118: mod_base = um
  modified_base 119: mod_base = OTHER; note = Phosphorothioate (PS) linkage
  modified_base 119: mod_base = cm
  modified_base 120: mod_base = OTHER; note = Phosphorothioate (PS) linkage
  modified_base 120: mod_base = gm
  source 1..120: mol_type = other RNA

SEQ ID NO: 429 - RNA, 119 nt, synthetic construct; identical to SEQ ID NO: 340
  modified_base 1: mod_base = um
  modified_base 2: mod_base = OTHER; note = Phosphorothioate (PS) linkage
  modified_base 2: mod_base = OTHER; note = 2'-O-methyladenosine
  modified_base 3: mod_base = OTHER; note = Phosphorothioate (PS) linkage
  modified_base 3: mod_base = gm
  modified_base 4: mod_base = OTHER; note = Phosphorothioate (PS) linkage
  modified_base 29: mod_base = gm
  modified_base 30: mod_base = cm
  modified_base 31: mod_base = um
  modified_base 32: mod_base = OTHER; note = 2'-O-methyladenosine
  modified_base 33: mod_base = gm
  modified_base 34: mod_base = OTHER; note = 2'-O-methyladenosine
  modified_base 35: mod_base = OTHER; note = 2'-O-methyladenosine
  modified_base 36: mod_base = OTHER; note = 2'-O-methyladenosine
  modified_base 37: mod_base = um
  modified_base 38: mod_base = OTHER; note = 2'-O-methyladenosine
  modified_base 39: mod_base = gm
  modified_base 40: mod_base = cm
  modified_base 68: mod_base = OTHER; note = 2'-O-methyladenosine
  modified_base 69: mod_base = OTHER; note = 2'-O-methyladenosine
  modified_base 70: mod_base = cm
  modified_base 71: mod_base = um
  modified_base 72: mod_base = um
  modified_base 73: mod_base = gm
  modified_base 74: mod_base = OTHER; note = 2'-O-methyladenosine
  modified_base 75: mod_base = OTHER; note = 2'-O-methyladenosine
  modified_base 76: mod_base = OTHER; note = 2'-O-methyladenosine
  modified_base 77: mod_base = OTHER; note = 2'-O-methyladenosine
  modified_base 78: mod_base = OTHER; note = 2'-O-methyladenosine
  modified_base 79: mod_base = gm
  modified_base 80: mod_base = um
  modified_base 81: mod_base = gm
  modified_base 82: mod_base = gm
  modified_base 83: mod_base = cm
  modified_base 84: mod_base = OTHER; note = 2'-O-methyladenosine
  modified_base 85: mod_base = cm
  modified_base 86: mod_base = cm
  modified_base 87: mod_base = gm
  modified_base 88: mod_base = OTHER; note = 2'-O-methyladenosine
  modified_base 89: mod_base = gm
  modified_base 90: mod_base = um
  modified_base 91: mod_base = cm
  modified_base 92: mod_base = gm
  modified_base 93: mod_base = gm
  modified_base 94: mod_base = um
  modified_base 95: mod_base = gm
  modified_base 96: mod_base = cm
  modified_base 117: mod_base = OTHER; note = Phosphorothioate (PS) linkage
  modified_base 117: mod_base = um
  modified_base 118: mod_base = OTHER; note = Phosphorothioate (PS) linkage
  modified_base 118: mod_base = um
  modified_base 119: mod_base = OTHER; note = Phosphorothioate (PS) linkage
  modified_base 119: mod_base = cm
  source 1..119: mol_type = other RNA

SEQ ID NO: 430 - RNA, 118 nt, synthetic construct; identical to SEQ ID NO: 341
  modified_base 1: mod_base = um
  modified_base 2: mod_base = OTHER; note = Phosphorothioate (PS) linkage
  modified_base 2: mod_base = OTHER; note = 2'-O-methyladenosine
  modified_base 3: mod_base = OTHER; note = Phosphorothioate (PS) linkage
  modified_base 3: mod_base = gm
  modified_base 4: mod_base = OTHER; note = Phosphorothioate (PS) linkage
  modified_base 29: mod_base = gm
  modified_base 30: mod_base = cm
  modified_base 31: mod_base = um
  modified_base 32: mod_base = OTHER; note = 2'-O-methyladenosine
  modified_base 33: mod_base = gm
  modified_base 34: mod_base = OTHER; note = 2'-O-methyladenosine
  modified_base 35: mod_base = OTHER; note = 2'-O-methyladenosine
  modified_base 36: mod_base = OTHER; note = 2'-O-methyladenosine
  modified_base 37: mod_base = um
  modified_base 38: mod_base = OTHER; note = 2'-O-methyladenosine
  modified_base 39: mod_base = gm
  modified_base 40: mod_base = cm
  modified_base 68: mod_base = OTHER; note = 2'-O-methyladenosine
  modified_base 69: mod_base = OTHER; note = 2'-O-methyladenosine
  modified_base 70: mod_base = cm
  modified_base 71: mod_base = um
  modified_base 72: mod_base = um
  modified_base 73: mod_base = gm
  modified_base 74: mod_base = OTHER; note = 2'-O-methyladenosine
  modified_base 75: mod_base = OTHER; note = 2'-O-methyladenosine
  modified_base 76: mod_base = OTHER; note = 2'-O-methyladenosine
  modified_base 77: mod_base = OTHER; note = 2'-O-methyladenosine
  modified_base 78: mod_base = OTHER; note = 2'-O-methyladenosine
  modified_base 79: mod_base = gm
  modified_base 80: mod_base = um
  modified_base 81: mod_base = gm
  modified_base 82: mod_base = gm
  modified_base 83: mod_base = cm
  modified_base 84: mod_base = OTHER; note = 2'-O-methyladenosine
  modified_base 85: mod_base = cm
  modified_base 86: mod_base = cm
  modified_base 87: mod_base = gm
  modified_base 88: mod_base = OTHER; note = 2'-O-methyladenosine
  modified_base 89: mod_base = gm
  modified_base 90: mod_base = um
  modified_base 91: mod_base = cm
  modified_base 92: mod_base = gm
  modified_base 93: mod_base = gm
  modified_base 94: mod_base = um
  modified_base 95: mod_base = gm
  modified_base 96: mod_base = cm
  modified_base 116: mod_base = OTHER; note = Phosphorothioate (PS) linkage
  modified_base 116: mod_base = gm
  modified_base 117: mod_base = OTHER; note = Phosphorothioate (PS) linkage
  modified_base 117: mod_base = um
  modified_base 118: mod_base = OTHER; note = Phosphorothioate (PS) linkage
  modified_base 118: mod_base = um
  source 1..118: mol_type = other RNA

SEQ ID NO: 431 - RNA, 117 nt, synthetic construct; identical to SEQ ID NO: 342
  modified_base 1: mod_base = um
  modified_base 2: mod_base = OTHER; note = Phosphorothioate (PS) linkage
  modified_base 2: mod_base = OTHER; note = 2'-O-methyladenosine
  modified_base 3: mod_base = OTHER; note = Phosphorothioate (PS) linkage
  modified_base 3: mod_base = gm
  modified_base 4: mod_base = OTHER; note = Phosphorothioate (PS) linkage
  modified_base 29: mod_base = gm
  modified_base 30: mod_base = cm
  modified_base 31: mod_base = um
  modified_base 32: mod_base = OTHER; note = 2'-O-methyladenosine
  modified_base 33: mod_base = gm
  modified_base 34: mod_base = OTHER; note = 2'-O-methyladenosine
  modified_base 35: mod_base = OTHER; note = 2'-O-methyladenosine
  modified_base 36: mod_base = OTHER; note = 2'-O-methyladenosine
  modified_base 37: mod_base = um
  modified_base 38: mod_base = OTHER; note = 2'-O-methyladenosine
  modified_base 39: mod_base = gm
  modified_base 40: mod_base = cm
  modified_base 68: mod_base = OTHER; note = 2'-O-methyladenosine
  modified_base 69: mod_base = OTHER; note = 2'-O-methyladenosine
  modified_base 70: mod_base = cm
  modified_base 71: mod_base = um
  modified_base 72: mod_base = um
  modified_base 73: mod_base = gm
  modified_base 74: mod_base = OTHER; note = 2'-O-methyladenosine
  modified_base 75: mod_base = OTHER; note = 2'-O-methyladenosine
  modified_base 76: mod_base = OTHER; note = 2'-O-methyladenosine
  modified_base 77: mod_base = OTHER; note = 2'-O-methyladenosine
  modified_base 78: mod_base = OTHER; note = 2'-O-methyladenosine
  modified_base 79: mod_base = gm
  modified_base 80: mod_base = um
  modified_base 81: mod_base = gm
  modified_base 82: mod_base = gm
  modified_base 83: mod_base = cm
  modified_base 84: mod_base = OTHER; note = 2'-O-methyladenosine
  modified_base 85: mod_base = cm
  modified_base 86: mod_base = cm
  modified_base 87: mod_base = gm
  modified_base 88: mod_base = OTHER; note = 2'-O-methyladenosine
  modified_base 89: mod_base = gm
  modified_base 90: mod_base = um
  modified_base 91: mod_base = cm
  modified_base 92: mod_base = gm
  modified_base 93: mod_base = gm
  modified_base 94: mod_base = um
  modified_base 95: mod_base = gm
  modified_base 96: mod_base = cm
  modified_base 115: mod_base = OTHER; note = Phosphorothioate (PS) linkage
  modified_base 115: mod_base = OTHER; note = 2'-O-methyladenosine
  modified_base 116: mod_base = OTHER; note = Phosphorothioate (PS) linkage
  modified_base 116: mod_base = gm
  modified_base 117: mod_base = OTHER; note = Phosphorothioate (PS) linkage
  modified_base 117: mod_base = um
  source 1..117: mol_type = other RNA

SEQ ID NO: 432 - RNA, 116 nt, synthetic construct; identical to SEQ ID NO: 343
  modified_base 1: mod_base = um
  modified_base 2: mod_base = OTHER; note = Phosphorothioate (PS) linkage
  modified_base 2: mod_base = OTHER; note = 2'-O-methyladenosine
  modified_base 3: mod_base = OTHER; note = Phosphorothioate (PS) linkage
  modified_base 3: mod_base = gm
  modified_base 4: mod_base = OTHER; note = Phosphorothioate (PS) linkage
  modified_base 29: mod_base = gm
  modified_base 30: mod_base = cm
  modified_base 31: mod_base = um
  modified_base 32: mod_base = OTHER; note = 2'-O-methyladenosine
  modified_base 33: mod_base = gm
  modified_base 34: mod_base = OTHER; note = 2'-O-methyladenosine
  modified_base 35: mod_base = OTHER; note = 2'-O-methyladenosine
  modified_base 36: mod_base = OTHER; note = 2'-O-methyladenosine
  modified_base 37: mod_base = um
  modified_base 38: mod_base = OTHER; note = 2'-O-methyladenosine
  modified_base 39: mod_base = gm
  modified_base 40: mod_base = cm
  modified_base 68: mod_base = OTHER; note = 2'-O-methyladenosine
  modified_base 69: mod_base = OTHER; note = 2'-O-methyladenosine
  modified_base 70: mod_base = cm
  modified_base 71: mod_base = um
  modified_base 72: mod_base = um
  modified_base 73: mod_base = gm
  modified_base 74: mod_base = OTHER; note = 2'-O-methyladenosine
  modified_base 75: mod_base = OTHER; note = 2'-O-methyladenosine
  modified_base 76: mod_base = OTHER; note = 2'-O-methyladenosine
  modified_base 77: mod_base = OTHER; note = 2'-O-methyladenosine
  modified_base 78: mod_base = OTHER; note = 2'-O-methyladenosine
  modified_base 79: mod_base = gm
  modified_base 80: mod_base = um
  modified_base 81: mod_base = gm
  modified_base 82: mod_base = gm
  modified_base 83: mod_base = cm
  modified_base 84: mod_base = OTHER; note = 2'-O-methyladenosine
  modified_base 85: mod_base = cm
  modified_base 86: mod_base = cm
  modified_base 87: mod_base = gm
  modified_base 88: mod_base = OTHER; note = 2'-O-methyladenosine
  modified_base 89: mod_base = gm
  modified_base 90: mod_base = um
  modified_base 91: mod_base = cm
  modified_base 92: mod_base = gm
  modified_base 93: mod_base = gm
  modified_base 94: mod_base = um
  modified_base 95: mod_base = gm
  modified_base 96: mod_base = cm
  modified_base 114: mod_base = OTHER; note = Phosphorothioate (PS) linkage
  modified_base 114: mod_base = cm
  modified_base 115: mod_base = OTHER; note = Phosphorothioate (PS) linkage
  modified_base 115: mod_base = OTHER; note = 2'-O-methyladenosine
  modified_base 116: mod_base = OTHER; note = Phosphorothioate (PS) linkage
  modified_base 116: mod_base = gm
  source 1..116: mol_type = other RNA

SEQ ID NO: 433 - RNA, 115 nt, synthetic construct; identical to SEQ ID NO: 344
  modified_base 1: mod_base = um
  modified_base 2: mod_base = OTHER; note = Phosphorothioate (PS) linkage
  modified_base 2: mod_base = OTHER; note = 2'-O-methyladenosine
  modified_base 3: mod_base = OTHER; note = Phosphorothioate (PS) linkage
  modified_base 3: mod_base = gm
  modified_base 4: mod_base = OTHER; note = Phosphorothioate (PS) linkage
  modified_base 29: mod_base = gm
  modified_base 30: mod_base = cm
  modified_base 31: mod_base = um
  modified_base 32: mod_base = OTHER; note = 2'-O-methyladenosine
  modified_base 33: mod_base = gm
  modified_base 34: mod_base = OTHER; note = 2'-O-methyladenosine
  modified_base 35: mod_base = OTHER; note = 2'-O-methyladenosine
  modified_base 36: mod_base = OTHER; note = 2'-O-methyladenosine
  modified_base 37: mod_base = um
  modified_base 38: mod_base = OTHER; note = 2'-O-methyladenosine
  modified_base 39: mod_base = gm
  modified_base 40: mod_base = cm
  modified_base 68: mod_base = OTHER; note = 2'-O-methyladenosine
  modified_base 69: mod_base = OTHER; note = 2'-O-methyladenosine
  modified_base 70: mod_base = cm
  modified_base 71: mod_base = um
  modified_base 72: mod_base = um
  modified_base 73: mod_base = gm
  modified_base 74: mod_base = OTHER; note = 2'-O-methyladenosine
  modified_base 75: mod_base = OTHER; note = 2'-O-methyladenosine
  modified_base 76: mod_base = OTHER; note = 2'-O-methyladenosine
  modified_base 77: mod_base = OTHER; note = 2'-O-methyladenosine
  modified_base 78: mod_base = OTHER; note = 2'-O-methyladenosine
  modified_base 79: mod_base = gm
  modified_base 80: mod_base = um
  modified_base 81: mod_base = gm
  modified_base 82: mod_base = gm
  modified_base 83: mod_base = cm
  modified_base 84: mod_base = OTHER; note = 2'-O-methyladenosine
  modified_base 85: mod_base = cm
  modified_base 86: mod_base = cm
  modified_base 87: mod_base = gm
  modified_base 88: mod_base = OTHER; note = 2'-O-methyladenosine
  modified_base 89: mod_base = gm
  modified_base 90: mod_base = um
  modified_base 91: mod_base = cm
  modified_base 92: mod_base = gm
  modified_base 93: mod_base = gm
  modified_base 94: mod_base = um
  modified_base 95: mod_base = gm
  modified_base 96: mod_base = cm
  modified_base 113: mod_base = OTHER; note = Phosphorothioate (PS) linkage
  modified_base 113: mod_base = um
  modified_base 114: mod_base = OTHER; note = Phosphorothioate (PS) linkage
  modified_base 114: mod_base = cm
  modified_base 115: mod_base = OTHER; note = Phosphorothioate (PS) linkage
  modified_base 115: mod_base = OTHER; note = 2'-O-methyladenosine
  source 1..115: mol_type = other RNA

SEQ ID NO: 434 - RNA, 114 nt, synthetic construct; identical to SEQ ID NO: 345
  modified_base 1: mod_base = um
  modified_base 2: mod_base = OTHER; note = Phosphorothioate (PS) linkage
  modified_base 2: mod_base = OTHER; note = 2'-O-methyladenosine
  modified_base 3: mod_base = OTHER; note = Phosphorothioate (PS) linkage
  modified_base 3: mod_base = gm
  modified_base 4: mod_base = OTHER; note = Phosphorothioate (PS) linkage
  modified_base 29: mod_base = gm
  modified_base 30: mod_base = cm
  modified_base 31: mod_base = um
  modified_base 32: mod_base = OTHER; note = 2'-O-methyladenosine
  modified_base 33: mod_base = gm
  modified_base 34: mod_base = OTHER; note = 2'-O-methyladenosine
  modified_base 35: mod_base = OTHER; note = 2'-O-methyladenosine
  modified_base 36: mod_base = OTHER; note = 2'-O-methyladenosine
  modified_base 37: mod_base = um
  modified_base 38: mod_base = OTHER; note = 2'-O-methyladenosine
  modified_base 39: mod_base = gm
  modified_base 40: mod_base = cm
  modified_base 68: mod_base = OTHER; note = 2'-O-methyladenosine
  modified_base 69: mod_base = OTHER; note = 2'-O-methyladenosine
  modified_base 70: mod_base = cm
  modified_base 71: mod_base = um
  modified_base 72: mod_base = um
  modified_base 73: mod_base = gm
  modified_base 74: mod_base = OTHER; note = 2'-O-methyladenosine
  modified_base 75: mod_base = OTHER; note = 2'-O-methyladenosine
  modified_base 76: mod_base = OTHER; note = 2'-O-methyladenosine
  modified_base 77: mod_base = OTHER; note = 2'-O-methyladenosine
  modified_base 78: mod_base = OTHER; note = 2'-O-methyladenosine
  modified_base 79: mod_base = gm
  modified_base 80: mod_base = um
  modified_base 81: mod_base = gm
  modified_base 82: mod_base = gm
  modified_base 83: mod_base = cm
  modified_base 84: mod_base = OTHER; note = 2'-O-methyladenosine
  modified_base 85: mod_base = cm
  modified_base 86: mod_base = cm
  modified_base 87: mod_base = gm
  modified_base 88: mod_base = OTHER; note = 2'-O-methyladenosine
  modified_base 89: mod_base = gm
  modified_base 90: mod_base = um
  modified_base 91: mod_base = cm
  modified_base 92: mod_base = gm
  modified_base 93: mod_base = gm
  modified_base 94: mod_base = um
  modified_base 95: mod_base = gm
  modified_base 96: mod_base = cm
  modified_base 112: mod_base = OTHER; note = Phosphorothioate (PS) linkage
  modified_base 112: mod_base = cm
  modified_base 113: mod_base = OTHER; note = Phosphorothioate (PS) linkage
  modified_base 113: mod_base = um
  modified_base 114: mod_base = OTHER; note = Phosphorothioate (PS) linkage
  modified_base 114: mod_base = cm
  source 1..114: mol_type = other RNA

SEQ ID NO: 435 - RNA, 113 nt, synthetic construct; identical to SEQ ID NO: 346
  modified_base 1: mod_base = um
  modified_base 2: mod_base = OTHER; note = Phosphorothioate (PS) linkage
  modified_base 2: mod_base = OTHER; note = 2'-O-methyladenosine
  modified_base 3: mod_base = OTHER; note = Phosphorothioate (PS) linkage
  modified_base 3: mod_base = gm
  modified_base 4: mod_base = OTHER; note = Phosphorothioate (PS) linkage
  modified_base 29: mod_base = gm
  modified_base 30: mod_base = cm
  modified_base 31: mod_base = um
  modified_base 32: mod_base = OTHER; note = 2'-O-methyladenosine
  modified_base 33: mod_base = gm
  modified_base 34: mod_base = OTHER; note = 2'-O-methyladenosine
  modified_base 35: mod_base = OTHER; note = 2'-O-methyladenosine
  modified_base 36: mod_base = OTHER; note = 2'-O-methyladenosine
  modified_base 37: mod_base = um
  modified_base 38: mod_base = OTHER; note = 2'-O-methyladenosine
  modified_base 39: mod_base = gm
  modified_base 40: mod_base = cm
  modified_base 68: mod_base = OTHER; note = 2'-O-methyladenosine
  modified_base 69: mod_base = OTHER; note = 2'-O-methyladenosine
  modified_base 70: mod_base = cm
  modified_base 71: mod_base = um
  modified_base 72: mod_base = um
  modified_base 73: mod_base = gm
  modified_base 74: mod_base = OTHER; note = 2'-O-methyladenosine
  modified_base 75: mod_base = OTHER; note = 2'-O-methyladenosine
  modified_base 76: mod_base = OTHER; note = 2'-O-methyladenosine
  modified_base 77: mod_base = OTHER; note = 2'-O-methyladenosine
  modified_base 78: mod_base = OTHER; note = 2'-O-methyladenosine
  modified_base 79: mod_base = gm
  modified_base 80: mod_base = um
  modified_base 81: mod_base = gm
  modified_base 82: mod_base = gm
  modified_base 83: mod_base = cm
  modified_base 84: mod_base = OTHER; note = 2'-O-methyladenosine
  modified_base 85: mod_base = cm
  modified_base 86: mod_base = cm
  modified_base 87: mod_base = gm
  modified_base 88: mod_base = OTHER; note = 2'-O-methyladenosine
  modified_base 89: mod_base = gm
  modified_base 90: mod_base = um
  modified_base 91: mod_base = cm
  modified_base 92: mod_base = gm
  modified_base 93: mod_base = gm
  modified_base 94: mod_base = um
  modified_base 95: mod_base = gm
  modified_base 96: mod_base = cm
  modified_base 111: mod_base = OTHER; note = Phosphorothioate (PS) linkage
  modified_base 111: mod_base = um
  modified_base 112: mod_base = OTHER; note = Phosphorothioate (PS) linkage
  modified_base 112: mod_base = cm
  modified_base 113: mod_base = OTHER; note = Phosphorothioate (PS) linkage
  modified_base 113: mod_base = um
  source 1..113: mol_type = other RNA

SEQ ID NO: 436 - RNA, 122 nt, synthetic construct; identical to SEQ ID NO: 347
  modified_base 1: mod_base = um
  modified_base 2: mod_base = OTHER; note = Phosphorothioate (PS) linkage
  modified_base 2: mod_base = OTHER; note = 2'-O-methyladenosine
  modified_base 3: mod_base = OTHER; note = Phosphorothioate (PS) linkage
  modified_base 3: mod_base = gm
  modified_base 4: mod_base = OTHER; note = Phosphorothioate (PS) linkage
  modified_base 29: mod_base = gm
  modified_base 30: mod_base = cm
  modified_base 31: mod_base = um
  modified_base 32: mod_base = OTHER; note = 2'-O-methyladenosine
  modified_base 33: mod_base = gm
  modified_base 34: mod_base = OTHER; note = 2'-O-methyladenosine
  modified_base 35: mod_base = OTHER; note = 2'-O-methyladenosine
  modified_base 36: mod_base = OTHER; note = 2'-O-methyladenosine
  modified_base 37: mod_base = um
  modified_base 38: mod_base = OTHER; note = 2'-O-methyladenosine
  modified_base 39: mod_base = gm
  modified_base 40: mod_base = cm
  modified_base 68: mod_base = OTHER; note = 2'-O-methyladenosine
  modified_base 69: mod_base = OTHER; note = 2'-O-methyladenosine
  modified_base 70: mod_base = cm
  modified_base 71: mod_base = um
  modified_base 72: mod_base = um
  modified_base 73: mod_base = gm
  modified_base 74: mod_base = OTHER; note = 2'-O-methyladenosine
  modified_base 75: mod_base = OTHER; note = 2'-O-methyladenosine
  modified_base 76: mod_base = OTHER; note = 2'-O-methyladenosine
  modified_base 77: mod_base = OTHER; note = 2'-O-methyladenosine
  modified_base 78: mod_base = OTHER; note = 2'-O-methyladenosine
  modified_base 79: mod_base = gm
  modified_base 80: mod_base = um
  modified_base 81: mod_base = gm
  modified_base 82: mod_base = gm
  modified_base 83: mod_base = cm
  modified_base 84: mod_base = OTHER; note = 2'-O-methyladenosine
  modified_base 85: mod_base = cm
  modified_base 86: mod_base = cm
  modified_base 87: mod_base = gm
  modified_base 88: mod_base = OTHER; note = 2'-O-methyladenosine
  modified_base 89: mod_base = gm
  modified_base 90: mod_base = um
  modified_base 91: mod_base = cm
  modified_base 92: mod_base = gm
  modified_base 93: mod_base = gm
  modified_base 94: mod_base = um
  modified_base 95: mod_base = gm
  modified_base 96: mod_base = cm
  modified_base 120: mod_base = OTHER; note = Phosphorothioate (PS) linkage
  modified_base 120: mod_base = um
  modified_base 121: mod_base = OTHER; note = Phosphorothioate (PS) linkage
  modified_base 121: mod_base = cm
  modified_base 122: mod_base = OTHER; note = Phosphorothioate (PS) linkage
  modified_base 122: mod_base = gm
  source 1..122: mol_type = other RNA

SEQ ID NO: 437 - RNA, 121 nt, synthetic construct; identical to SEQ ID NO: 348
  modified_base 1: mod_base = um
  modified_base 2: mod_base = OTHER; note = Phosphorothioate (PS) linkage
  modified_base 2: mod_base = OTHER; note = 2'-O-methyladenosine
  modified_base 3: mod_base = OTHER; note = Phosphorothioate (PS) linkage
  modified_base 3: mod_base = gm
  modified_base 4: mod_base = OTHER; note = Phosphorothioate (PS) linkage
  modified_base 29: mod_base = gm
  modified_base 30: mod_base = cm
  modified_base 31: mod_base = um
  modified_base 32: mod_base = OTHER; note = 2'-O-methyladenosine
  modified_base 33: mod_base = gm
  modified_base 34: mod_base = OTHER; note = 2'-O-methyladenosine
  modified_base 35: mod_base = OTHER; note = 2'-O-methyladenosine
  modified_base 36: mod_base = OTHER; note = 2'-O-methyladenosine
  modified_base 37: mod_base = um
  modified_base 38: mod_base = OTHER; note = 2'-O-methyladenosine
  modified_base 39: mod_base = gm
  modified_base 40: mod_base = cm
  modified_base 68: mod_base = OTHER; note = 2'-O-methyladenosine
  modified_base 69: mod_base = OTHER; note = 2'-O-methyladenosine
  modified_base 70: mod_base = cm
  modified_base 71: mod_base = um
  modified_base 72: mod_base = um
  modified_base 73: mod_base = gm
  modified_base 74: mod_base = OTHER; note = 2'-O-methyladenosine
  modified_base 75: mod_base = OTHER; note = 2'-O-methyladenosine
  modified_base 76: mod_base = OTHER; note = 2'-O-methyladenosine
  modified_base 77: mod_base = OTHER; note = 2'-O-methyladenosine
  modified_base 78: mod_base = OTHER; note = 2'-O-methyladenosine
  modified_base 79: mod_base = gm
  modified_base 80: mod_base = um
  modified_base 81: mod_base = gm
  modified_base 82: mod_base = gm
  modified_base 83: mod_base = cm
  modified_base 84: mod_base = OTHER; note = 2'-O-methyladenosine
  modified_base 85: mod_base = cm
  modified_base 86: mod_base = cm
  modified_base 87: mod_base = gm
  modified_base 88: mod_base = OTHER; note = 2'-O-methyladenosine
  modified_base 89: mod_base = gm
  modified_base 90: mod_base = um
  modified_base 91: mod_base = cm
  modified_base 92: mod_base = gm
  modified_base 93: mod_base = gm
  modified_base 94: mod_base = um
  modified_base 95: mod_base = gm
  modified_base 96: mod_base = cm
  modified_base 119: mod_base = OTHER; note = Phosphorothioate (PS) linkage
  modified_base 119: mod_base = um
  modified_base 120: mod_base = OTHER; note = Phosphorothioate (PS) linkage
  modified_base 120: mod_base = um
  modified_base 121: mod_base = OTHER; note = Phosphorothioate (PS) linkage
  modified_base 121: mod_base = cm
  source 1..121: mol_type = other RNA

SEQ ID NO: 438 - RNA, 120 nt, synthetic construct; identical to SEQ ID NO: 349
  modified_base 1: mod_base = um
  modified_base 2: mod_base = OTHER; note = Phosphorothioate (PS) linkage
  modified_base 2: mod_base = OTHER; note = 2'-O-methyladenosine
  modified_base 3: mod_base = OTHER; note = Phosphorothioate (PS) linkage
  modified_base 3: mod_base = gm
  modified_base 4: mod_base = OTHER; note = Phosphorothioate (PS) linkage
  modified_base 29: mod_base = gm
  modified_base 30: mod_base = cm
  modified_base 31: mod_base = um
  modified_base 32: mod_base = OTHER; note = 2'-O-methyladenosine
  modified_base 33: mod_base = gm
  modified_base 34: mod_base = OTHER; note = 2'-O-methyladenosine
  modified_base 35: mod_base = OTHER; note = 2'-O-methyladenosine
  modified_base 36: mod_base = OTHER; note = 2'-O-methyladenosine
  modified_base 37: mod_base = um
  modified_base 38: mod_base = OTHER; note = 2'-O-methyladenosine
  modified_base 39: mod_base = gm
  modified_base 40: mod_base = cm
  modified_base 68: mod_base = OTHER; note = 2'-O-methyladenosine
  modified_base 69: mod_base = OTHER; note = 2'-O-methyladenosine
  modified_base 70: mod_base = cm
  modified_base 71: mod_base = um
  modified_base 72: mod_base = um
  modified_base 73: mod_base = gm
  modified_base 74: mod_base = OTHER; note = 2'-O-methyladenosine
  modified_base 75: mod_base = OTHER; note = 2'-O-methyladenosine
  modified_base 76: mod_base = OTHER; note = 2'-O-methyladenosine
  modified_base 77: mod_base = OTHER; note = 2'-O-methyladenosine
  modified_base 78: mod_base = OTHER; note = 2'-O-methyladenosine
  modified_base 79: mod_base = gm
  modified_base 80: mod_base = um
  modified_base 81: mod_base = gm
  modified_base 82: mod_base = gm
  modified_base 83: mod_base = cm
  modified_base 84: mod_base = OTHER; note = 2'-O-methyladenosine
  modified_base 85: mod_base = cm
  modified_base 86: mod_base = cm
  modified_base 87: mod_base = gm
  modified_base 88: mod_base = OTHER; note = 2'-O-methyladenosine
  modified_base 89: mod_base = gm
  modified_base 90: mod_base = um
  modified_base 91: mod_base = cm
  modified_base 92: mod_base = gm
  modified_base 93: mod_base = gm
  modified_base 94: mod_base = um
  modified_base 95: mod_base = gm
  modified_base 96: mod_base = cm
  modified_base 118: mod_base = OTHER; note = Phosphorothioate (PS) linkage
  modified_base 118: mod_base = gm
  modified_base 119: mod_base = OTHER; note = Phosphorothioate (PS) linkage
  modified_base 119: mod_base = um
  modified_base 120: mod_base = OTHER; note = Phosphorothioate (PS) linkage
  modified_base 120: mod_base = um
  source 1..120: mol_type = other RNA

SEQ ID NO: 439 - RNA, 119 nt, synthetic construct; identical to SEQ ID NO: 350
  modified_base 1: mod_base = um
  modified_base 2: mod_base = OTHER; note = Phosphorothioate (PS) linkage
  modified_base 2: mod_base = OTHER; note = 2'-O-methyladenosine
  modified_base 3: mod_base = OTHER; note = Phosphorothioate (PS) linkage
  modified_base 3: mod_base = gm
  modified_base 4: mod_base = OTHER; note = Phosphorothioate (PS) linkage
  modified_base 29: mod_base = gm
  modified_base 30: mod_base = cm
  modified_base 31: mod_base = um
  modified_base 32: mod_base = OTHER; note = 2'-O-methyladenosine
  modified_base 33: mod_base = gm
  modified_base 34: mod_base = OTHER; note = 2'-O-methyladenosine
  modified_base 35: mod_base = OTHER; note = 2'-O-methyladenosine
  modified_base 36: mod_base = OTHER; note = 2'-O-methyladenosine
  modified_base 37: mod_base = um
  modified_base 38: mod_base = OTHER; note = 2'-O-methyladenosine
  modified_base 39: mod_base = gm
  modified_base 40: mod_base = cm
  modified_base 68: mod_base = OTHER; note = 2'-O-methyladenosine
  modified_base 69: mod_base = OTHER; note = 2'-O-methyladenosine
  modified_base 70: mod_base = cm
  modified_base 71: mod_base = um
  modified_base 72: mod_base = um
  modified_base 73: mod_base = gm
  modified_base 74: mod_base = OTHER; note = 2'-O-methyladenosine
  modified_base 75: mod_base = OTHER; note = 2'-O-methyladenosine
  modified_base 76: mod_base = OTHER; note = 2'-O-methyladenosine
  modified_base 77: mod_base = OTHER; note = 2'-O-methyladenosine
  modified_base 78: mod_base = OTHER; note = 2'-O-methyladenosine
  modified_base 79: mod_base = gm
  modified_base 80: mod_base = um
  modified_base 81: mod_base = gm
  modified_base 82: mod_base = gm
  modified_base 83: mod_base = cm
  modified_base 84: mod_base = OTHER; note = 2'-O-methyladenosine
  modified_base 85: mod_base = cm
  modified_base 86: mod_base = cm
  modified_base 87: mod_base = gm
  modified_base 88: mod_base = OTHER; note = 2'-O-methyladenosine
  modified_base 89: mod_base = gm
  modified_base 90: mod_base = um
  modified_base 91: mod_base = cm
  modified_base 92: mod_base = gm
  modified_base 93: mod_base = gm
  modified_base 94: mod_base = um
  modified_base 95: mod_base = gm
  modified_base 96: mod_base = cm
  modified_base 117: mod_base = OTHER; note = Phosphorothioate (PS) linkage
  modified_base 117: mod_base = OTHER; note = 2'-O-methyladenosine
  modified_base 118: mod_base = OTHER; note = Phosphorothioate (PS) linkage
  modified_base 118: mod_base = gm
  modified_base 119: mod_base = OTHER; note = Phosphorothioate (PS) linkage
  modified_base 119: mod_base = um
  source 1..119: mol_type = other RNA

SEQ ID NO: 440 - RNA, 118 nt, synthetic construct; identical to SEQ ID NO: 351
  modified_base 1: mod_base = um
  modified_base 2: mod_base = OTHER; note = Phosphorothioate (PS) linkage
  modified_base 2: mod_base = OTHER; note = 2'-O-methyladenosine
  modified_base 3: mod_base = OTHER; note = Phosphorothioate (PS) linkage
  modified_base 3: mod_base = gm
  modified_base 4: mod_base = OTHER; note = Phosphorothioate (PS) linkage
  modified_base 29: mod_base = gm
  modified_base 30: mod_base = cm
  modified_base 31: mod_base = um
  modified_base 32: mod_base = OTHER; note = 2'-O-methyladenosine
  modified_base 33: mod_base = gm
  modified_base 34: mod_base = OTHER; note = 2'-O-methyladenosine
  modified_base 35: mod_base = OTHER; note = 2'-O-methyladenosine
  modified_base 36: mod_base = OTHER; note = 2'-O-methyladenosine
  modified_base 37: mod_base = um
  modified_base 38: mod_base = OTHER; note = 2'-O-methyladenosine
  modified_base 39: mod_base = gm
  modified_base 40: mod_base = cm
  modified_base 68: mod_base = OTHER; note = 2'-O-methyladenosine
  modified_base 69: mod_base = OTHER; note = 2'-O-methyladenosine
  modified_base 70: mod_base = cm
  modified_base 71: mod_base = um
  modified_base 72: mod_base = um
  modified_base 73: mod_base = gm
  modified_base 74: mod_base = OTHER; note = 2'-O-methyladenosine
  modified_base 75: mod_base = OTHER; note = 2'-O-methyladenosine
  modified_base 76: mod_base = OTHER; note = 2'-O-methyladenosine
  modified_base 77: mod_base = OTHER; note = 2'-O-methyladenosine
  modified_base 78: mod_base = OTHER; note = 2'-O-methyladenosine
  modified_base 79: mod_base = gm
  modified_base 80: mod_base = um
  modified_base 81: mod_base = gm
  modified_base 82: mod_base = gm
  modified_base 83: mod_base = cm
  modified_base 84: mod_base = OTHER; note = 2'-O-methyladenosine
  modified_base 85: mod_base = cm
  modified_base 86: mod_base = cm
  modified_base 87: mod_base = gm
  modified_base 88: mod_base = OTHER; note = 2'-O-methyladenosine
  modified_base 89: mod_base = gm
  modified_base 90: mod_base = um
  modified_base 91: mod_base = cm
  modified_base 92: mod_base = gm
  modified_base 93: mod_base = gm
  modified_base 94: mod_base = um
  modified_base 95: mod_base = gm
  modified_base 96: mod_base = cm
  modified_base 116: mod_base = OTHER; note = Phosphorothioate (PS) linkage
  modified_base 116: mod_base = cm
  modified_base 117: mod_base = OTHER; note = Phosphorothioate (PS) linkage
  modified_base 117: mod_base = OTHER; note = 2'-O-methyladenosine
  modified_base 118: mod_base = OTHER; note = Phosphorothioate (PS) linkage
  modified_base 118: mod_base = gm
  source 1..118: mol_type = other RNA

SEQ ID NO: 441 - RNA, 117 nt, synthetic construct; identical to SEQ ID NO: 352
  modified_base 1: mod_base = um
  modified_base 2: mod_base = OTHER; note = Phosphorothioate (PS) linkage
  modified_base 2: mod_base = OTHER; note = 2'-O-methyladenosine
  modified_base 3: mod_base = OTHER; note = Phosphorothioate (PS) linkage
  modified_base 3: mod_base = gm
  modified_base 4: mod_base = OTHER; note = Phosphorothioate (PS) linkage
  modified_base 29: mod_base = gm
  modified_base 30: mod_base = cm
  modified_base 31: mod_base = um
  modified_base 32: mod_base = OTHER; note = 2'-O-methyladenosine
  modified_base 33: mod_base = gm
  modified_base 34: mod_base = OTHER; note = 2'-O-methyladenosine
  modified_base 35: mod_base = OTHER; note = 2'-O-methyladenosine
  modified_base 36: mod_base = OTHER; note = 2'-O-methyladenosine
  modified_base 37: mod_base = um
  modified_base 38: mod_base = OTHER; note = 2'-O-methyladenosine
  modified_base 39: mod_base = gm
  modified_base 40: mod_base = cm
  modified_base 68: mod_base = OTHER; note = 2'-O-methyladenosine
  modified_base 69: mod_base = OTHER; note = 2'-O-methyladenosine
  modified_base 70: mod_base = cm
  modified_base 71: mod_base = um
  modified_base 72: mod_base = um
  modified_base 73: mod_base = gm
  modified_base 74: mod_base = OTHER; note = 2'-O-methyladenosine
  modified_base 75: mod_base = OTHER; note = 2'-O-methyladenosine
  modified_base 76: mod_base = OTHER; note = 2'-O-methyladenosine
  modified_base 77: mod_base = OTHER; note = 2'-O-methyladenosine
  modified_base 78: mod_base = OTHER; note = 2'-O-methyladenosine
  modified_base 79: mod_base = gm
  modified_base 80: mod_base = um
  modified_base 81: mod_base = gm
  modified_base 82: mod_base = gm
  modified_base 83: mod_base = cm
  modified_base 84: mod_base = OTHER; note = 2'-O-methyladenosine
  modified_base 85: mod_base = cm
  modified_base 86: mod_base = cm
  modified_base 87: mod_base = gm
  modified_base 88: mod_base = OTHER; note = 2'-O-methyladenosine
  modified_base 89: mod_base = gm
  modified_base 90: mod_base = um
  modified_base 91: mod_base = cm
  modified_base 92: mod_base = gm
  modified_base 93: mod_base = gm
  modified_base 94: mod_base = um
  modified_base 95: mod_base = gm
  modified_base 96: mod_base = cm
  modified_base 115: mod_base = OTHER; note = Phosphorothioate (PS) linkage
  modified_base 115: mod_base = um
  modified_base 116: mod_base = OTHER; note = Phosphorothioate (PS) linkage
  modified_base 116: mod_base = cm
  modified_base 117: mod_base = OTHER; note = Phosphorothioate (PS) linkage
  modified_base 117: mod_base = OTHER; note = 2'-O-methyladenosine
  source 1..117: mol_type = other RNA

SEQ ID NO: 442 - RNA, 116 nt, synthetic construct; identical to SEQ ID NO: 353
  modified_base 1: mod_base = um
  modified_base 2: mod_base = OTHER; note = Phosphorothioate (PS) linkage
  modified_base 2: mod_base = OTHER; note = 2'-O-methyladenosine
  modified_base 3: mod_base = OTHER; note = Phosphorothioate (PS) linkage
  modified_base 3: mod_base = gm
  modified_base 4: mod_base = OTHER; note = Phosphorothioate (PS) linkage
  modified_base 29: mod_base = gm
  modified_base 30: mod_base = cm
  modified_base 31: mod_base = um
  modified_base 32: mod_base = OTHER; note = 2'-O-methyladenosine
  modified_base 33: mod_base = gm
  modified_base 34: mod_base = OTHER; note = 2'-O-methyladenosine
  modified_base 35: mod_base = OTHER; note = 2'-O-methyladenosine
  modified_base 36: mod_base = OTHER; note = 2'-O-methyladenosine
  modified_base 37: mod_base = um
  modified_base 38: mod_base = OTHER; note = 2'-O-methyladenosine
  modified_base 39: mod_base = gm
  modified_base 40: mod_base = cm
  modified_base 68: mod_base = OTHER; note = 2'-O-methyladenosine
  modified_base 69: mod_base = OTHER; note = 2'-O-methyladenosine
  modified_base 70: mod_base = cm
  modified_base 71: mod_base = um
  modified_base 72: mod_base = um
  modified_base 73: mod_base = gm
  modified_base 74: mod_base = OTHER; note = 2'-O-methyladenosine
  modified_base 75: mod_base = OTHER; note = 2'-O-methyladenosine
  modified_base 76: mod_base = OTHER; note = 2'-O-methyladenosine
  modified_base 77: mod_base = OTHER; note = 2'-O-methyladenosine
  modified_base 78: mod_base = OTHER; note = 2'-O-methyladenosine
  modified_base 79: mod_base = gm
  modified_base 80: mod_base = um
  modified_base 81: mod_base = gm
  modified_base 82: mod_base = gm
  modified_base 83: mod_base = cm
  modified_base 84: mod_base = OTHER; note = 2'-O-methyladenosine
  modified_base 85: mod_base = cm
  modified_base 86: mod_base = cm
  modified_base 87: mod_base = gm
  modified_base 88: mod_base = OTHER; note = 2'-O-methyladenosine
  modified_base 89: mod_base = gm
  modified_base 90: mod_base = um
  modified_base 91: mod_base = cm
  modified_base 92: mod_base = gm
  modified_base 93: mod_base = gm
  modified_base 94: mod_base = um
  modified_base 95: mod_base = gm
  modified_base 96: mod_base = cm
  modified_base 114: mod_base = OTHER; note = Phosphorothioate (PS) linkage
  modified_base 114: mod_base = cm
  modified_base 115: mod_base = OTHER; note = Phosphorothioate (PS) linkage
  modified_base 115: mod_base = um
  modified_base 116: mod_base = OTHER; note = Phosphorothioate (PS) linkage
  modified_base 116: mod_base = cm
  source 1..116: mol_type = other RNA

SEQ ID NO: 443 - RNA, 115 nt, synthetic construct; identical to SEQ ID NO: 354
  modified_base 1: mod_base = um
  modified_base 2: mod_base = OTHER; note = Phosphorothioate (PS) linkage
  modified_base 2: mod_base = OTHER; note = 2'-O-methyladenosine
  modified_base 3: mod_base = OTHER; note = Phosphorothioate (PS) linkage
  modified_base 3: mod_base = gm
  modified_base 4: mod_base = OTHER; note = Phosphorothioate (PS) linkage
  modified_base 29: mod_base = gm
  modified_base 30: mod_base = cm
  modified_base 31: mod_base = um
  modified_base 32: mod_base = OTHER; note = 2'-O-methyladenosine
  modified_base 33: mod_base = gm
  modified_base 34: mod_base = OTHER; note = 2'-O-methyladenosine
  modified_base 35: mod_base = OTHER; note = 2'-O-methyladenosine
  modified_base 36: mod_base = OTHER; note = 2'-O-methyladenosine
  modified_base 37: mod_base = um
  modified_base 38: mod_base = OTHER; note = 2'-O-methyladenosine
  modified_base 39: mod_base = gm
  modified_base 40: mod_base = cm
  modified_base 68: mod_base = OTHER; note = 2'-O-methyladenosine
  modified_base 69: mod_base = OTHER; note = 2'-O-methyladenosine
  modified_base 70: mod_base = cm
  modified_base 71: mod_base = um
  modified_base 72: mod_base = um
  modified_base 73: mod_base = gm
  modified_base 74: mod_base = OTHER; note = 2'-O-methyladenosine
  modified_base 75: mod_base = OTHER; note = 2'-O-methyladenosine
  modified_base 76: mod_base = OTHER; note = 2'-O-methyladenosine
  modified_base 77: mod_base = OTHER; note = 2'-O-methyladenosine
  modified_base 78: mod_base = OTHER; note = 2'-O-methyladenosine
  modified_base 79: mod_base = gm
  modified_base 80: mod_base = um
  modified_base 81: mod_base = gm
  modified_base 82: mod_base = gm
  modified_base 83: mod_base = cm
  modified_base 84: mod_base = OTHER; note = 2'-O-methyladenosine
  modified_base 85: mod_base = cm
  modified_base 86: mod_base = cm
  modified_base 87: mod_base = gm
  modified_base 88: mod_base = OTHER; note = 2'-O-methyladenosine
  modified_base 89: mod_base = gm
  modified_base 90: mod_base = um
  modified_base 91: mod_base = cm
  modified_base 92: mod_base = gm
  modified_base 93: mod_base = gm
  modified_base 94: mod_base = um
  modified_base 95: mod_base = gm
  modified_base 96: mod_base = cm
  modified_base 113: mod_base = OTHER; note = Phosphorothioate (PS) linkage
  modified_base 113: mod_base = um
  modified_base 114: mod_base = OTHER; note = Phosphorothioate (PS) linkage
  modified_base 114: mod_base = cm
  modified_base 115: mod_base = OTHER; note = Phosphorothioate (PS) linkage
  modified_base 115: mod_base = um
  source 1..115: mol_type = other RNA

SEQ ID NO: 444 - RNA, 125 nt, synthetic construct; identical to SEQ ID NO: 355
  modified_base 1: mod_base = um
  modified_base 2: mod_base = OTHER; note = Phosphorothioate (PS) linkage
  modified_base 2: mod_base = OTHER; note = 2'-O-methyladenosine
  modified_base 3: mod_base = OTHER; note = Phosphorothioate (PS) linkage
  modified_base 3: mod_base = gm
  modified_base 4: mod_base = OTHER; note = Phosphorothioate (PS) linkage
  modified_base 29: mod_base = gm
  modified_base 30: mod_base = cm
  modified_base 31: mod_base = um
  modified_base 32: mod_base = OTHER; note = 2'-O-methyladenosine
  modified_base 33: mod_base = gm
  modified_base 34: mod_base = OTHER; note = 2'-O-methyladenosine
  modified_base 35: mod_base = OTHER; note = 2'-O-methyladenosine
  modified_base 36: mod_base = OTHER; note = 2'-O-methyladenosine
  modified_base 37: mod_base = um
  modified_base 38: mod_base = OTHER; note = 2'-O-methyladenosine
  modified_base 39: mod_base = gm
  modified_base 40: mod_base = cm
  modified_base 68: mod_base = OTHER; note = 2'-O-methyladenosine
  modified_base 69: mod_base = OTHER; note = 2'-O-methyladenosine
  modified_base 70: mod_base = cm
  modified_base 71: mod_base = um
  modified_base 72: mod_base = um
  modified_base 73: mod_base = gm
  modified_base 74: mod_base = OTHER; note = 2'-O-methyladenosine
  modified_base 75: mod_base = OTHER; note = 2'-O-methyladenosine
  modified_base 76: mod_base = OTHER; note = 2'-O-methyladenosine
  modified_base 77: mod_base = OTHER; note = 2'-O-methyladenosine
  modified_base 78: mod_base = OTHER; note = 2'-O-methyladenosine
  modified_base 79: mod_base = gm
  modified_base 80: mod_base = um
  modified_base 81: mod_base = gm
  modified_base 82: mod_base = gm
  modified_base 83: mod_base = cm
  modified_base 84: mod_base = OTHER; note = 2'-O-methyladenosine
  modified_base 85: mod_base = cm
  modified_base 86: mod_base = cm
  modified_base 87: mod_base = gm
  modified_base 88: mod_base = OTHER; note = 2'-O-methyladenosine
  modified_base 89: mod_base = gm
  modified_base 90: mod_base = um
  modified_base 91: mod_base = cm
  modified_base 92: mod_base = gm
  modified_base 93: mod_base = gm
  modified_base 94: mod_base = um
  modified_base 95: mod_base = gm
  modified_base 96: mod_base = cm
  modified_base 123: mod_base = OTHER; note = Phosphorothioate (PS) linkage
  modified_base 123: mod_base = cm
  modified_base 124: mod_base = OTHER; note = Phosphorothioate (PS) linkage
  modified_base 124: mod_base = gm
  modified_base 125: mod_base = OTHER; note = Phosphorothioate (PS) linkage
  modified_base 125: mod_base = cm
  source 1..125: mol_type = other RNA

SEQ ID NO: 445 - RNA, 124 nt, synthetic construct; identical to SEQ ID NO: 356
  modified_base 1: mod_base = um
  modified_base 2: mod_base = OTHER; note = Phosphorothioate (PS) linkage
  modified_base 2: mod_base = OTHER; note = 2'-O-methyladenosine
  modified_base 3: mod_base = OTHER; note = Phosphorothioate (PS) linkage
  modified_base 3: mod_base = gm
  modified_base 4: mod_base = OTHER; note = Phosphorothioate (PS) linkage
  modified_base 29: mod_base = gm
  modified_base 30: mod_base = cm
  modified_base 31: mod_base = um
  modified_base 32: mod_base = OTHER; note = 2'-O-methyladenosine
  modified_base 33: mod_base = gm
  modified_base 34: mod_base = OTHER; note = 2'-O-methyladenosine
  modified_base 35: mod_base = OTHER; note = 2'-O-methyladenosine
  modified_base 36: mod_base = OTHER; note = 2'-O-methyladenosine
  modified_base 37: mod_base = um
  modified_base 38: mod_base = OTHER; note = 2'-O-methyladenosine
  modified_base 39: mod_base = gm
  modified_base 40: mod_base = cm
  modified_base 68: mod_base = OTHER; note = 2'-O-methyladenosine
  modified_base 69: mod_base = OTHER; note = 2'-O-methyladenosine
  modified_base 70: mod_base = cm
  modified_base 71: mod_base = um
  modified_base 72: mod_base = um
  modified_base 73: mod_base = gm
  modified_base 74: mod_base = OTHER; note = 2'-O-methyladenosine
  modified_base 75: mod_base = OTHER; note = 2'-O-methyladenosine
  modified_base 76: mod_base = OTHER; note = 2'-O-methyladenosine
  modified_base 77: mod_base = OTHER; note = 2'-O-methyladenosine
  modified_base 78: mod_base = OTHER; note = 2'-O-methyladenosine
  modified_base 79: mod_base = gm
  modified_base 80: mod_base = um
  modified_base 81: mod_base = gm
  modified_base 82: mod_base = gm
  modified_base 83: mod_base = cm
  modified_base 84: mod_base = OTHER; note = 2'-O-methyladenosine
  modified_base 85: mod_base = cm
  modified_base 86: mod_base = cm
  modified_base 87: mod_base = gm
  modified_base 88: mod_base = OTHER; note = 2'-O-methyladenosine
  modified_base 89: mod_base = gm
  modified_base 90: mod_base = um
  modified_base 91: mod_base = cm
  modified_base 92: mod_base = gm
  modified_base 93: mod_base = gm
  modified_base 94: mod_base = um
  modified_base 95: mod_base = gm
  modified_base 96: mod_base = cm
  modified_base 122: mod_base = OTHER; note = Phosphorothioate (PS) linkage
  modified_base 122: mod_base = um
  modified_base 123: mod_base = OTHER; note = Phosphorothioate (PS) linkage
  modified_base 123: mod_base = cm
  modified_base 124: mod_base = OTHER; note = Phosphorothioate (PS) linkage
  modified_base 124: mod_base = gm
  source 1..124: mol_type = other RNA

SEQ ID NO: 446 - RNA, 123 nt, synthetic construct; identical to SEQ ID NO: 357
  modified_base 1: mod_base = um
  modified_base 2: mod_base = OTHER; note = Phosphorothioate (PS) linkage
  modified_base 2: mod_base = OTHER; note = 2'-O-methyladenosine
  modified_base 3: mod_base = OTHER; note = Phosphorothioate (PS) linkage
  modified_base 3: mod_base = gm
  modified_base 4: mod_base = OTHER; note = Phosphorothioate (PS) linkage
  modified_base 29: mod_base = gm
  modified_base 30: mod_base = cm
  modified_base 31: mod_base = um
  modified_base 32: mod_base = OTHER; note = 2'-O-methyladenosine
  modified_base 33: mod_base = gm
  modified_base 34: mod_base = OTHER; note = 2'-O-methyladenosine
  modified_base 35: mod_base = OTHER; note = 2'-O-methyladenosine
  modified_base 36: mod_base = OTHER; note = 2'-O-methyladenosine
  modified_base 37: mod_base = um
  modified_base 38: mod_base = OTHER; note = 2'-O-methyladenosine
  modified_base 39: mod_base = gm
  modified_base 40: mod_base = cm
  modified_base 68: mod_base = OTHER; note = 2'-O-methyladenosine
  modified_base 69: mod_base = OTHER; note = 2'-O-methyladenosine
  modified_base 70: mod_base = cm
  modified_base 71: mod_base = um
  modified_base 72: mod_base = um
  modified_base 73: mod_base = gm
  modified_base 74: mod_base = OTHER; note = 2'-O-methyladenosine
  modified_base 75: mod_base = OTHER; note = 2'-O-methyladenosine
  modified_base 76: mod_base = OTHER; note = 2'-O-methyladenosine
  modified_base 77: mod_base = OTHER; note = 2'-O-methyladenosine
  modified_base 78: mod_base = OTHER; note = 2'-O-methyladenosine
  modified_base 79: mod_base = gm
  modified_base 80: mod_base = um
  modified_base 81: mod_base = gm
  modified_base 82: mod_base = gm
  modified_base 83: mod_base = cm
  modified_base 84: mod_base = OTHER; note = 2'-O-methyladenosine
  modified_base 85: mod_base = cm
  modified_base 86: mod_base = cm
  modified_base 87: mod_base = gm
  modified_base 88: mod_base = OTHER; note = 2'-O-methyladenosine
  modified_base 89: mod_base = gm
  modified_base 90: mod_base = um
  modified_base 91: mod_base = cm
  modified_base 92: mod_base = gm
  modified_base 93: mod_base = gm
  modified_base 94: mod_base = um
  modified_base 95: mod_base = gm
  modified_base 96: mod_base = cm
  modified_base 121: mod_base = OTHER; note = Phosphorothioate (PS) linkage
  modified_base 121: mod_base = um
  modified_base 122: mod_base = OTHER; note = Phosphorothioate (PS) linkage
  modified_base 122: mod_base = um
  modified_base 123: mod_base = OTHER; note = Phosphorothioate (PS) linkage
  modified_base 123: mod_base = cm
  source 1..123: mol_type = other RNA

SEQ ID NO: 447 - RNA, 122 nt, synthetic construct; identical to SEQ ID NO: 358
  modified_base 1: mod_base = um
  modified_base 2: mod_base = OTHER; note = Phosphorothioate (PS) linkage
  modified_base 2: mod_base = OTHER; note = 2'-O-methyladenosine
  modified_base 3: mod_base = OTHER; note = Phosphorothioate (PS) linkage
  modified_base 3: mod_base = gm
  modified_base 4: mod_base = OTHER; note = Phosphorothioate (PS) linkage
  modified_base 29: mod_base = gm
  modified_base 30: mod_base = cm
  modified_base 31: mod_base = um
  modified_base 32: mod_base = OTHER; note = 2'-O-methyladenosine
  modified_base 33: mod_base = gm
  modified_base 34: mod_base = OTHER; note = 2'-O-methyladenosine
  modified_base 35: mod_base = OTHER; note = 2'-O-methyladenosine
  modified_base 36: mod_base = OTHER; note = 2'-O-methyladenosine
  modified_base 37: mod_base = um
  modified_base 38: mod_base = OTHER; note = 2'-O-methyladenosine
  modified_base 39: mod_base = gm
  modified_base 40: mod_base = cm
  modified_base 68: mod_base = OTHER; note = 2'-O-methyladenosine
  modified_base 69: mod_base = OTHER; note = 2'-O-methyladenosine
  modified_base 70: mod_base = cm
  modified_base 71: mod_base = um
  modified_base 72: mod_base = um
  modified_base 73: mod_base = gm
  modified_base 74: mod_base = OTHER; note = 2'-O-methyladenosine
  modified_base 75: mod_base = OTHER; note = 2'-O-methyladenosine
  modified_base 76: mod_base = OTHER; note = 2'-O-methyladenosine
  modified_base 77: mod_base = OTHER; note = 2'-O-methyladenosine
  modified_base 78: mod_base = OTHER; note = 2'-O-methyladenosine
  modified_base 79: mod_base = gm
  modified_base 80: mod_base = um
  modified_base 81: mod_base = gm
  modified_base 82: mod_base = gm
  modified_base 83: mod_base = cm
  modified_base 84: mod_base = OTHER; note = 2'-O-methyladenosine
  modified_base 85: mod_base = cm
  modified_base 86: mod_base = cm
  modified_base 87: mod_base = gm
  modified_base 88: mod_base = OTHER; note = 2'-O-methyladenosine
  modified_base 89: mod_base = gm
  modified_base 90: mod_base = um
  modified_base 91: mod_base = cm
  modified_base 92: mod_base = gm
  modified_base 93: mod_base = gm
  modified_base 94: mod_base = um
  modified_base 95: mod_base = gm
  modified_base 96: mod_base = cm
  modified_base 120: mod_base = OTHER; note = Phosphorothioate (PS) linkage
  modified_base 120: mod_base = gm
  modified_base 121: mod_base = OTHER; note = Phosphorothioate (PS) linkage
  modified_base 121: mod_base = um
  modified_base 122: mod_base = OTHER; note = Phosphorothioate (PS) linkage
  modified_base 122: mod_base = um
  source 1..122: mol_type = other RNA

SEQ ID NO: 448 - RNA, 121 nt, synthetic construct; identical to SEQ ID NO: 359
  modified_base 1: mod_base = um
  modified_base 2: mod_base = OTHER; note = Phosphorothioate (PS) linkage
  modified_base 2: mod_base = OTHER; note = 2'-O-methyladenosine
  modified_base 3: mod_base = OTHER; note = Phosphorothioate (PS) linkage
  modified_base 3: mod_base = gm
  modified_base 4: mod_base = OTHER; note = Phosphorothioate (PS) linkage
  modified_base 29: mod_base = gm
  modified_base 30: mod_base = cm
  modified_base 31: mod_base = um
  modified_base 32: mod_base = OTHER; note = 2'-O-methyladenosine
  modified_base 33: mod_base = gm
  modified_base 34: mod_base = OTHER; note = 2'-O-methyladenosine
  modified_base 35: mod_base = OTHER; note = 2'-O-methyladenosine
  modified_base 36: mod_base = OTHER; note = 2'-O-methyladenosine
  modified_base 37: mod_base = um
  modified_base 38: mod_base = OTHER; note = 2'-O-methyladenosine
  modified_base 39: mod_base = gm
  modified_base 40: mod_base = cm
  modified_base 68: mod_base = OTHER; note = 2'-O-methyladenosine
  modified_base 69: mod_base = OTHER; note = 2'-O-methyladenosine
  modified_base 70: mod_base = cm
  modified_base 71: mod_base = um
  modified_base 72: mod_base = um
  modified_base 73: mod_base = gm
  modified_base 74: mod_base = OTHER; note = 2'-O-methyladenosine
  modified_base 75: mod_base = OTHER; note = 2'-O-methyladenosine
  modified_base 76: mod_base = OTHER; note = 2'-O-methyladenosine
  modified_base 77: mod_base = OTHER; note = 2'-O-methyladenosine
  modified_base 78: mod_base = OTHER; note = 2'-O-methyladenosine
  modified_base 79: mod_base = gm
  modified_base 80: mod_base = um
  modified_base 81: mod_base = gm
  modified_base 82: mod_base = gm
  modified_base 83: mod_base = cm
  modified_base 84: mod_base = OTHER; note = 2'-O-methyladenosine
  modified_base 85: mod_base = cm
  modified_base 86: mod_base = cm
  modified_base 87: mod_base = gm
  modified_base 88: mod_base = OTHER; note = 2'-O-methyladenosine
  modified_base 89: mod_base = gm
  modified_base 90: mod_base = um
  modified_base 91: mod_base = cm
  modified_base 92: mod_base = gm
  modified_base 93: mod_base = gm
  modified_base 94: mod_base = um
  modified_base 95: mod_base = gm
  modified_base 96: mod_base = cm
  modified_base 119: mod_base = OTHER; note = Phosphorothioate (PS) linkage
  modified_base 119: mod_base = OTHER; note = 2'-O-methyladenosine
  modified_base 120: mod_base = OTHER; note = Phosphorothioate (PS) linkage
  modified_base 120: mod_base = gm
  modified_base 121: mod_base = OTHER; note = Phosphorothioate (PS) linkage
  modified_base 121: mod_base = um
  source 1..121: mol_type = other RNA

SEQ ID NO: 449 - RNA, 120 nt, synthetic construct; identical to SEQ ID NO: 360
  modified_base 1: mod_base = um
  modified_base 2: mod_base = OTHER; note = Phosphorothioate (PS) linkage
  modified_base 2: mod_base = OTHER; note = 2'-O-methyladenosine
  modified_base 3: mod_base = OTHER; note = Phosphorothioate (PS) linkage
  modified_base 3: mod_base = gm
  modified_base 4: mod_base = OTHER; note = Phosphorothioate (PS) linkage
  modified_base 29: mod_base = gm
  modified_base 30: mod_base = cm
  modified_base 31: mod_base = um
  modified_base 32: mod_base = OTHER; note = 2'-O-methyladenosine
  modified_base 33: mod_base = gm
  modified_base 34: mod_base = OTHER; note = 2'-O-methyladenosine
  modified_base 35: mod_base = OTHER; note = 2'-O-methyladenosine
  modified_base 36: mod_base = OTHER; note = 2'-O-methyladenosine
  modified_base 37: mod_base = um
  modified_base 38: mod_base = OTHER; note = 2'-O-methyladenosine
  modified_base 39: mod_base = gm
  modified_base 40: mod_base = cm
  modified_base 68: mod_base = OTHER; note = 2'-O-methyladenosine
  modified_base 69: mod_base = OTHER; note = 2'-O-methyladenosine
  modified_base 70: mod_base = cm
  modified_base 71: mod_base = um
  modified_base 72: mod_base = um
  modified_base 73: mod_base = gm
  modified_base 74: mod_base = OTHER; note = 2'-O-methyladenosine
  modified_base 75: mod_base = OTHER; note = 2'-O-methyladenosine
  modified_base 76: mod_base = OTHER; note = 2'-O-methyladenosine
  modified_base 77: mod_base = OTHER; note = 2'-O-methyladenosine
  modified_base 78: mod_base = OTHER; note = 2'-O-methyladenosine
  modified_base 79: mod_base = gm
  modified_base 80: mod_base = um
  modified_base 81: mod_base = gm
  modified_base 82: mod_base = gm
  modified_base 83: mod_base = cm
  modified_base 84: mod_base = OTHER; note = 2'-O-methyladenosine
  modified_base 85: mod_base = cm
  modified_base 86: mod_base = cm
  modified_base 87: mod_base = gm
  modified_base 88: mod_base = OTHER; note = 2'-O-methyladenosine
  modified_base 89: mod_base = gm
  modified_base 90: mod_base = um
  modified_base 91: mod_base = cm
  modified_base 92: mod_base = gm
  modified_base 93: mod_base = gm
  modified_base 94: mod_base = um
  modified_base 95: mod_base = gm
  modified_base 96: mod_base = cm
  modified_base 118: mod_base = OTHER; note = Phosphorothioate (PS) linkage
  modified_base 118: mod_base = cm
  modified_base 119: mod_base = OTHER; note = Phosphorothioate (PS) linkage
  modified_base 119: mod_base = OTHER; note = 2'-O-methyladenosine
  modified_base 120: mod_base = OTHER; note = Phosphorothioate (PS) linkage
  modified_base 120: mod_base = gm
  source 1..120: mol_type = other RNA

SEQ ID NO: 450 - RNA, 119 nt, synthetic construct; identical to SEQ ID NO: 361
  modified_base 1: mod_base = um
  modified_base 2: mod_base = OTHER; note = Phosphorothioate (PS) linkage
  modified_base 2: mod_base = OTHER; note = 2'-O-methyladenosine
  modified_base 3: mod_base = OTHER; note = Phosphorothioate (PS) linkage
  modified_base 3: mod_base = gm
  modified_base 4: mod_base = OTHER; note = Phosphorothioate (PS) linkage
  modified_base 29: mod_base = gm
  modified_base 30: mod_base = cm
  modified_base 31: mod_base = um
  modified_base 32: mod_base = OTHER; note = 2'-O-methyladenosine
  modified_base 33: mod_base = gm
  modified_base 34: mod_base = OTHER; note = 2'-O-methyladenosine
  modified_base 35: mod_base = OTHER; note = 2'-O-methyladenosine
  modified_base 36: mod_base = OTHER; note = 2'-O-methyladenosine
  modified_base 37: mod_base = um
  modified_base 38: mod_base = OTHER; note = 2'-O-methyladenosine
  modified_base 39: mod_base = gm
  modified_base 40: mod_base = cm
  modified_base 68: mod_base = OTHER; note = 2'-O-methyladenosine
  modified_base 69: mod_base = OTHER; note = 2'-O-methyladenosine
  modified_base 70: mod_base = cm
  modified_base 71: mod_base = um
  modified_base 72: mod_base = um
  modified_base 73: mod_base = gm
  modified_base 74: mod_base = OTHER; note = 2'-O-methyladenosine
  modified_base 75: mod_base = OTHER; note = 2'-O-methyladenosine
  modified_base 76: mod_base = OTHER; note = 2'-O-methyladenosine
  modified_base 77: mod_base = OTHER; note = 2'-O-methyladenosine
  modified_base 78: mod_base = OTHER; note = 2'-O-methyladenosine
  modified_base 79: mod_base = gm
  modified_base 80: mod_base = um
  modified_base 81: mod_base = gm
  modified_base 82: mod_base = gm
  modified_base 83: mod_base = cm
  modified_base 84: mod_base = OTHER; note = 2'-O-methyladenosine
  modified_base 85: mod_base = cm
  modified_base 86: mod_base = cm
  modified_base 87: mod_base = gm
  modified_base 88: mod_base = OTHER; note = 2'-O-methyladenosine
  modified_base 89: mod_base = gm
  modified_base 90: mod_base = um
  modified_base 91: mod_base = cm
  modified_base 92: mod_base = gm
  modified_base 93: mod_base = gm
  modified_base 94: mod_base = um
  modified_base 95: mod_base = gm
  modified_base 96: mod_base = cm
  modified_base 117: mod_base = OTHER; note = Phosphorothioate (PS) linkage
  modified_base 117: mod_base = um
  modified_base 118: mod_base = OTHER; note = Phosphorothioate (PS) linkage
  modified_base 118: mod_base = cm
  modified_base 119: mod_base = OTHER; note = Phosphorothioate (PS) linkage
  modified_base 119: mod_base = OTHER; note = 2'-O-methyladenosine
  source 1..119: mol_type = other RNA

SEQ ID NO: 451 - RNA, 118 nt, synthetic construct; identical to SEQ ID NO: 362
  modified_base 1: mod_base = um
  modified_base 2: mod_base = OTHER; note = Phosphorothioate (PS) linkage
  modified_base 2: mod_base = OTHER; note = 2'-O-methyladenosine
  modified_base 3: mod_base = OTHER; note = Phosphorothioate (PS) linkage
  modified_base 3: mod_base = gm
  modified_base 4: mod_base = OTHER; note = Phosphorothioate (PS) linkage
  modified_base 29: mod_base = gm
  modified_base 30: mod_base = cm
  modified_base 31: mod_base = um
  modified_base 32: mod_base = OTHER; note = 2'-O-methyladenosine
  modified_base 33: mod_base = gm
  modified_base 34: mod_base = OTHER; note = 2'-O-methyladenosine
  modified_base 35: mod_base = OTHER; note = 2'-O-methyladenosine
  modified_base 36: mod_base = OTHER; note = 2'-O-methyladenosine
  modified_base 37: mod_base = um
  modified_base 38: mod_base = OTHER; note = 2'-O-methyladenosine
  modified_base 39: mod_base = gm
  modified_base 40: mod_base = cm
  modified_base 68: mod_base = OTHER; note = 2'-O-methyladenosine
  modified_base 69: mod_base = OTHER; note = 2'-O-methyladenosine
  modified_base 70: mod_base = cm
  modified_base 71: mod_base = um
  modified_base 72: mod_base = um
  modified_base 73: mod_base = gm
  modified_base 74: mod_base = OTHER; note = 2'-O-methyladenosine
  modified_base 75: mod_base = OTHER; note = 2'-O-methyladenosine
  modified_base 76: mod_base = OTHER; note = 2'-O-methyladenosine
  modified_base 77: mod_base = OTHER; note = 2'-O-methyladenosine
  modified_base 78: mod_base = OTHER; note = 2'-O-methyladenosine
  modified_base 79: mod_base = gm
  modified_base 80: mod_base = um
  modified_base 81: mod_base = gm
  modified_base 82: mod_base = gm
  modified_base 83: mod_base = cm
  modified_base 84: mod_base = OTHER; note = 2'-O-methyladenosine
  modified_base 85: mod_base = cm
  modified_base 86: mod_base = cm
  modified_base 87: mod_base = gm
  modified_base 88: mod_base = OTHER; note = 2'-O-methyladenosine
  modified_base 89: mod_base = gm
  modified_base 90: mod_base = um
  modified_base 91: mod_base = cm
  modified_base 92: mod_base = gm
  modified_base 93: mod_base = gm
  modified_base 94: mod_base = um
  modified_base 95: mod_base = gm
  modified_base 96: mod_base = cm
  modified_base 116: mod_base = OTHER; note = Phosphorothioate (PS) linkage
  modified_base 116: mod_base = cm
  modified_base 117: mod_base = OTHER; note = Phosphorothioate (PS) linkage
  modified_base 117: mod_base = um
  modified_base 118: mod_base = OTHER; note = Phosphorothioate (PS) linkage
  modified_base 118: mod_base = cm
  source 1..118: mol_type = other RNA

SEQ ID NO: 452 - RNA, 117 nt, synthetic construct; identical to SEQ ID NO: 363
  modified_base 1: mod_base = um
  modified_base 2: mod_base = OTHER; note = Phosphorothioate (PS) linkage
  modified_base 2: mod_base = OTHER; note = 2'-O-methyladenosine
  modified_base 3: mod_base = OTHER; note = Phosphorothioate (PS) linkage
  modified_base 3: mod_base = gm
  modified_base 4: mod_base = OTHER; note = Phosphorothioate (PS) linkage
  modified_base 29: mod_base = gm
  modified_base 30: mod_base = cm
  modified_base 31: mod_base = um
  modified_base 32: mod_base = OTHER; note = 2'-O-methyladenosine
  modified_base 33: mod_base = gm
  modified_base 34: mod_base = OTHER; note = 2'-O-methyladenosine
  modified_base 35: mod_base = OTHER; note = 2'-O-methyladenosine
  modified_base 36: mod_base = OTHER; note = 2'-O-methyladenosine
  modified_base 37: mod_base = um
  modified_base 38: mod_base = OTHER; note = 2'-O-methyladenosine
  modified_base 39: mod_base = gm
  modified_base 40: mod_base = cm
  modified_base 68: mod_base = OTHER; note = 2'-O-methyladenosine
  modified_base 69: mod_base = OTHER; note = 2'-O-methyladenosine
  modified_base 70: mod_base = cm
  modified_base 71: mod_base = um
  modified_base 72: mod_base = um
  modified_base 73: mod_base = gm
  modified_base 74: mod_base = OTHER; note = 2'-O-methyladenosine
  modified_base 75: mod_base = OTHER; note = 2'-O-methyladenosine
  modified_base 76: mod_base = OTHER; note = 2'-O-methyladenosine
  modified_base 77: mod_base = OTHER; note = 2'-O-methyladenosine
  modified_base 78: mod_base = OTHER; note = 2'-O-methyladenosine
  modified_base 79: mod_base = gm
  modified_base 80: mod_base = um
  modified_base 81: mod_base = gm
  modified_base 82: mod_base = gm
  modified_base 83: mod_base = cm
  modified_base 84: mod_base = OTHER; note = 2'-O-methyladenosine
  modified_base 85: mod_base = cm
  modified_base 86: mod_base = cm
  modified_base 87: mod_base = gm
  modified_base 88: mod_base = OTHER; note = 2'-O-methyladenosine
  modified_base 89: mod_base = gm
  modified_base 90: mod_base = um
  modified_base 91: mod_base = cm
  modified_base 92: mod_base = gm
  modified_base 93: mod_base = gm
  modified_base 94: mod_base = um
  modified_base 95: mod_base = gm
  modified_base 96: mod_base = cm
  modified_base 115: mod_base = OTHER; note = Phosphorothioate (PS) linkage
  modified_base 115: mod_base = um
  modified_base 116: mod_base = OTHER; note = Phosphorothioate (PS) linkage
  modified_base 116: mod_base = cm
  modified_base 117: mod_base = OTHER; note = Phosphorothioate (PS) linkage
  modified_base 117: mod_base = um
  source 1..117: mol_type = other RNA

SEQ ID NO: 453 - RNA, 118 nt, synthetic construct; identical to SEQ ID NO: 364
  modified_base 1: mod_base = OTHER; note = 2'-O-methyladenosine
  modified_base 2: mod_base = OTHER; note = Phosphorothioate (PS) linkage
  modified_base 2: mod_base = cm
  modified_base 3: mod_base = OTHER; note = Phosphorothioate (PS) linkage
  modified_base 3: mod_base = um
  modified_base 4: mod_base = OTHER; note = Phosphorothioate (PS) linkage
  modified_base 29: mod_base = gm
  modified_base 30: mod_base = cm
  modified_base 31: mod_base = um
  modified_base 32: mod_base = OTHER; note = 2'-O-methyladenosine
  modified_base 33: mod_base = gm
  modified_base 34: mod_base = OTHER; note = 2'-O-methyladenosine
  modified_base 35: mod_base = OTHER; note = 2'-O-methyladenosine
  modified_base 36: mod_base = OTHER; note = 2'-O-methyladenosine
  modified_base 37: mod_base = um
  modified_base 38: mod_base = OTHER; note = 2'-O-methyladenosine
  modified_base 39: mod_base = gm
  modified_base 40: mod_base = cm
  modified_base 68: mod_base = OTHER; note = 2'-O-methyladenosine
  modified_base 69: mod_base = OTHER; note = 2'-O-methyladenosine
  modified_base 70: mod_base = cm
  modified_base 71: mod_base = um
  modified_base 72: mod_base = um
  modified_base 73: mod_base = gm
  modified_base 74: mod_base = OTHER; note = 2'-O-methyladenosine
  modified_base 75: mod_base = OTHER; note = 2'-O-methyladenosine
  modified_base 76: mod_base = OTHER; note = 2'-O-methyladenosine
  modified_base 77: mod_base = OTHER; note = 2'-O-methyladenosine
  modified_base 78: mod_base = OTHER; note = 2'-O-methyladenosine
  modified_base 79: mod_base = gm
  modified_base 80: mod_base = um
  modified_base 81: mod_base = gm
  modified_base 82: mod_base = gm
  modified_base 83: mod_base = cm
  modified_base 84: mod_base = OTHER; note = 2'-O-methyladenosine
  modified_base 85: mod_base = cm
  modified_base 86: mod_base = cm
  modified_base 87: mod_base = gm
  modified_base 88: mod_base = OTHER; note = 2'-O-methyladenosine
  modified_base 89: mod_base = gm
  modified_base 90: mod_base = um
  modified_base 91: mod_base = cm
  modified_base 92: mod_base = gm
  modified_base 93: mod_base = gm
  modified_base 94: mod_base = um
  modified_base 95: mod_base = gm
  modified_base 96: mod_base = cm
  modified_base 116: mod_base = OTHER; note = Phosphorothioate (PS) linkage
  modified_base 116: mod_base = OTHER; note = 2'-O-methyladenosine
  modified_base 117: mod_base = OTHER; note = Phosphorothioate (PS) linkage
  modified_base 117: mod_base = OTHER; note = 2'-O-methyladenosine
  modified_base 118: mod_base = OTHER; note = Phosphorothioate (PS) linkage
  modified_base 118: mod_base = OTHER; note = 2'-O-methyladenosine
  source 1..118: mol_type = other RNA

SEQ ID NO: 454 - RNA, 117 nt, synthetic construct; identical to SEQ ID NO: 365
  modified_base 1: mod_base = OTHER; note = 2'-O-methyladenosine
  modified_base 2: mod_base = OTHER; note = Phosphorothioate (PS) linkage
  modified_base 2: mod_base = cm
  modified_base 3: mod_base = OTHER; note = Phosphorothioate (PS) linkage
  modified_base 3: mod_base = um
  modified_base 4: mod_base = OTHER; note = Phosphorothioate (PS) linkage
  modified_base 29: mod_base = gm
  modified_base 30: mod_base = cm
  modified_base 31: mod_base = um
  modified_base 32: mod_base = OTHER; note = 2'-O-methyladenosine
  modified_base 33: mod_base = gm
  modified_base 34: mod_base = OTHER; note = 2'-O-methyladenosine
  modified_base 35: mod_base = OTHER; note = 2'-O-methyladenosine
  modified_base 36: mod_base = OTHER; note = 2'-O-methyladenosine
  modified_base 37: mod_base = um
  modified_base 38: mod_base = OTHER; note = 2'-O-methyladenosine
  modified_base 39: mod_base = gm
  modified_base 40: mod_base = cm
  modified_base 68: mod_base = OTHER; note = 2'-O-methyladenosine
  modified_base 69: mod_base = OTHER; note = 2'-O-methyladenosine
  modified_base 70: mod_base = cm
  modified_base 71: mod_base = um
  modified_base 72: mod_base = um
  modified_base 73: mod_base = gm
  modified_base 74: mod_base = OTHER; note = 2'-O-methyladenosine
  modified_base 75: mod_base = OTHER; note = 2'-O-methyladenosine
  modified_base 76: mod_base = OTHER; note = 2'-O-methyladenosine
  modified_base 77: mod_base = OTHER; note = 2'-O-methyladenosine
  modified_base 78: mod_base = OTHER; note = 2'-O-methyladenosine
  modified_base 79: mod_base = gm
  modified_base 80: mod_base = um
  modified_base 81: mod_base = gm
  modified_base 82: mod_base = gm
  modified_base 83: mod_base = cm
  modified_base 84: mod_base = OTHER; note = 2'-O-methyladenosine
  modified_base 85: mod_base = cm
  modified_base 86: mod_base = cm
  modified_base 87: mod_base = gm
  modified_base 88: mod_base = OTHER; note = 2'-O-methyladenosine
  modified_base 89: mod_base = gm
  modified_base 90: mod_base = um
  modified_base 91: mod_base = cm
  modified_base 92: mod_base = gm
  modified_base 93: mod_base = gm
  modified_base 94: mod_base = um
  modified_base 95: mod_base = gm
  modified_base 96: mod_base = cm
  modified_base 115: mod_base = OTHER; note = Phosphorothioate (PS) linkage
  modified_base 115: mod_base = cm
  modified_base 116: mod_base = OTHER; note = Phosphorothioate (PS) linkage
  modified_base 116: mod_base = OTHER; note = 2'-O-methyladenosine
  modified_base 117: mod_base = OTHER; note = Phosphorothioate (PS) linkage
  modified_base 117: mod_base = OTHER; note = 2'-O-methyladenosine
  source 1..117: mol_type = other RNA

SEQ ID NO: 455 - RNA, 116 nt, synthetic construct; identical to SEQ ID NO: 366
  modified_base 1: mod_base = OTHER; note = 2'-O-methyladenosine
  modified_base 2: mod_base = OTHER; note = Phosphorothioate (PS) linkage
  modified_base 2: mod_base = cm
  modified_base 3: mod_base = OTHER; note = Phosphorothioate (PS) linkage
  modified_base 3: mod_base = um
  modified_base 4: mod_base = OTHER; note = Phosphorothioate (PS) linkage
  modified_base 29: mod_base = gm
  modified_base 30: mod_base = cm
  modified_base 31: mod_base = um
  modified_base 32: mod_base = OTHER; note = 2'-O-methyladenosine
  modified_base 33: mod_base = gm
  modified_base 34: mod_base = OTHER; note = 2'-O-methyladenosine
  modified_base 35: mod_base = OTHER; note = 2'-O-methyladenosine
  modified_base 36: mod_base = OTHER; note = 2'-O-methyladenosine
  modified_base 37: mod_base = um
  modified_base 38: mod_base = OTHER; note = 2'-O-methyladenosine
  modified_base 39: mod_base = gm
  modified_base 40: mod_base = cm
  modified_base 68: mod_base = OTHER; note = 2'-O-methyladenosine
  modified_base 69: mod_base = OTHER; note = 2'-O-methyladenosine
  modified_base 70: mod_base = cm
  modified_base 71: mod_base = um
  modified_base 72: mod_base = um
  modified_base 73: mod_base = gm
  modified_base 74: mod_base = OTHER; note = 2'-O-methyladenosine
  modified_base 75: mod_base = OTHER; note = 2'-O-methyladenosine
  modified_base 76: mod_base = OTHER; note = 2'-O-methyladenosine
  modified_base 77: mod_base = OTHER; note = 2'-O-methyladenosine
  modified_base 78: mod_base = OTHER; note = 2'-O-methyladenosine
  modified_base 79: mod_base = gm
  modified_base 80: mod_base = um
  modified_base 81: mod_base = gm
  modified_base 82: mod_base = gm
  modified_base 83: mod_base = cm
  modified_base 84: mod_base = OTHER; note = 2'-O-methyladenosine
  modified_base 85: mod_base = cm
  modified_base 86: mod_base = cm
  modified_base 87: mod_base = gm
  modified_base 88: mod_base = OTHER; note = 2'-O-methyladenosine
  modified_base 89: mod_base = gm
  modified_base 90: mod_base = um
  modified_base 91: mod_base = cm
  modified_base 92: mod_base = gm
  modified_base 93: mod_base = gm
  modified_base 94: mod_base = um
  modified_base 95: mod_base = gm
  modified_base 96: mod_base = cm
  modified_base 114: mod_base = OTHER; note = Phosphorothioate (PS) linkage
  modified_base 114: mod_base = gm
  modified_base 115: mod_base = OTHER; note = Phosphorothioate (PS) linkage
  modified_base 115: mod_base = cm
  modified_base 116: mod_base = OTHER; note = Phosphorothioate (PS) linkage
  modified_base 116: mod_base = OTHER; note = 2'-O-methyladenosine
  source 1..116: mol_type = other RNA

SEQ ID NO: 456 - RNA, 115 nt, synthetic construct; identical to SEQ ID NO: 367
  modified_base 1: mod_base = OTHER; note = 2'-O-methyladenosine
  modified_base 2: mod_base = OTHER; note = Phosphorothioate (PS) linkage
  modified_base 2: mod_base = cm
  modified_base 3: mod_base = OTHER; note = Phosphorothioate (PS) linkage
  modified_base 3: mod_base = um
  modified_base 4: mod_base = OTHER; note = Phosphorothioate (PS) linkage
  modified_base 29: mod_base = gm
  modified_base 30: mod_base = cm
  modified_base 31: mod_base = um
  modified_base 32: mod_base = OTHER; note = 2'-O-methyladenosine
  modified_base 33: mod_base = gm
  modified_base 34: mod_base = OTHER; note = 2'-O-methyladenosine
  modified_base 35: mod_base = OTHER; note = 2'-O-methyladenosine
  modified_base 36: mod_base = OTHER; note = 2'-O-methyladenosine
  modified_base 37: mod_base = um
  modified_base 38: mod_base = OTHER; note = 2'-O-methyladenosine
  modified_base 39: mod_base = gm
  modified_base 40: mod_base = cm
  modified_base 68: mod_base = OTHER; note = 2'-O-methyladenosine
  modified_base 69: mod_base = OTHER; note = 2'-O-methyladenosine
  modified_base 70: mod_base = cm
  modified_base 71: mod_base = um
  modified_base 72: mod_base = um
  modified_base 73: mod_base = gm
  modified_base 74: mod_base = OTHER; note = 2'-O-methyladenosine
  modified_base 75: mod_base = OTHER; note = 2'-O-methyladenosine
  modified_base 76: mod_base = OTHER; note = 2'-O-methyladenosine
  modified_base 77: mod_base = OTHER; note = 2'-O-methyladenosine
  modified_base 78: mod_base = OTHER; note = 2'-O-methyladenosine
  modified_base 79: mod_base = gm
  modified_base 80: mod_base = um
  modified_base 81: mod_base = gm
  modified_base 82: mod_base = gm
  modified_base 83: mod_base = cm
  modified_base 84: mod_base = OTHER; note = 2'-O-methyladenosine
  modified_base 85: mod_base = cm
  modified_base 86: mod_base = cm
  modified_base 87: mod_base = gm
  modified_base 88: mod_base = OTHER; note = 2'-O-methyladenosine
  modified_base 89: mod_base = gm
  modified_base 90: mod_base = um
  modified_base 91: mod_base = cm
  modified_base 92: mod_base = gm
  modified_base 93: mod_base = gm
  modified_base 94: mod_base = um
  modified_base 95: mod_base = gm
  modified_base 96: mod_base = cm
  modified_base 113: mod_base = OTHER; note = Phosphorothioate (PS) linkage
  modified_base 113: mod_base = OTHER; note = 2'-O-methyladenosine
  modified_base 114: mod_base = OTHER; note = Phosphorothioate (PS) linkage
  modified_base 114: mod_base = gm
  modified_base 115: mod_base = OTHER; note = Phosphorothioate (PS) linkage
  modified_base 115: mod_base = cm
  source 1..115: mol_type = other RNA

SEQ ID NO: 457 - RNA, 114 nt, synthetic construct; identical to SEQ ID NO: 368
  modified_base 1: mod_base = OTHER; note = 2'-O-methyladenosine
  modified_base 2: mod_base = OTHER; note = Phosphorothioate (PS) linkage
  modified_base 2: mod_base = cm
  modified_base 3: mod_base = OTHER; note = Phosphorothioate (PS) linkage
  modified_base 3: mod_base = um
  modified_base 4: mod_base = OTHER; note = Phosphorothioate (PS) linkage
  modified_base 29: mod_base = gm
  modified_base 30: mod_base = cm
  modified_base 31: mod_base = um
  modified_base 32: mod_base = OTHER; note = 2'-O-methyladenosine
  modified_base 33: mod_base = gm
  modified_base 34: mod_base = OTHER; note = 2'-O-methyladenosine
  modified_base 35: mod_base = OTHER; note = 2'-O-methyladenosine
  modified_base 36: mod_base = OTHER; note = 2'-O-methyladenosine
  modified_base 37: mod_base = um
  modified_base 38: mod_base = OTHER; note = 2'-O-methyladenosine
  modified_base 39: mod_base = gm
  modified_base 40: mod_base = cm
  modified_base 68: mod_base = OTHER; note = 2'-O-methyladenosine
  modified_base 69: mod_base = OTHER; note = 2'-O-methyladenosine
  modified_base 70: mod_base = cm
  modified_base 71: mod_base = um
  modified_base 72: mod_base = um
  modified_base 73: mod_base = gm
  modified_base 74: mod_base = OTHER; note = 2'-O-methyladenosine
  modified_base 75: mod_base = OTHER; note = 2'-O-methyladenosine
  modified_base 76: mod_base = OTHER; note = 2'-O-methyladenosine
  modified_base 77: mod_base = OTHER; note = 2'-O-methyladenosine
  modified_base 78: mod_base = OTHER; note = 2'-O-methyladenosine
  modified_base 79: mod_base = gm
  modified_base 80: mod_base = um
  modified_base 81: mod_base = gm
  modified_base 82: mod_base = gm
  modified_base 83: mod_base = cm
  modified_base 84: mod_base = OTHER; note = 2'-O-methyladenosine
  modified_base 85: mod_base = cm
  modified_base 86: mod_base = cm
  modified_base 87: mod_base = gm
  modified_base 88: mod_base = OTHER; note = 2'-O-methyladenosine
  modified_base 89: mod_base = gm
  modified_base 90: mod_base = um
  modified_base 91: mod_base = cm
  modified_base 92: mod_base = gm
  modified_base 93: mod_base = gm
  modified_base 94: mod_base = um
  modified_base 95: mod_base = gm
  modified_base 96: mod_base = cm
  modified_base 112: mod_base = OTHER; note = Phosphorothioate (PS) linkage
  modified_base 112: mod_base = cm
  modified_base 113: mod_base = OTHER; note = Phosphorothioate (PS) linkage
  modified_base 113: mod_base = OTHER; note = 2'-O-methyladenosine
  modified_base 114: mod_base = OTHER; note = Phosphorothioate (PS) linkage
  modified_base 114: mod_base = gm
  source 1..114: mol_type = other RNA

SEQ ID NO: 458 - RNA, 113 nt, synthetic construct; identical to SEQ ID NO: 369
  modified_base 1: mod_base = OTHER; note = 2'-O-methyladenosine
  modified_base 2: mod_base = OTHER; note = Phosphorothioate (PS) linkage
  modified_base 2: mod_base = cm
  modified_base 3: mod_base = OTHER; note = Phosphorothioate (PS) linkage
  modified_base 3: mod_base = um
  modified_base 4: mod_base = OTHER; note = Phosphorothioate (PS) linkage
  modified_base 29: mod_base = gm
  modified_base 30: mod_base = cm
  modified_base 31: mod_base = um
  modified_base 32: mod_base = OTHER; note = 2'-O-methyladenosine
  modified_base 33: mod_base = gm
  modified_base 34: mod_base = OTHER; note = 2'-O-methyladenosine
  modified_base 35: mod_base = OTHER; note = 2'-O-methyladenosine
  modified_base 36: mod_base = OTHER; note = 2'-O-methyladenosine
  modified_base 37: mod_base = um
  modified_base 38: mod_base = OTHER; note = 2'-O-methyladenosine
  modified_base 39: mod_base = gm
  modified_base 40: mod_base = cm
  modified_base 68: mod_base = OTHER; note = 2'-O-methyladenosine
  modified_base 69: mod_base = OTHER; note = 2'-O-methyladenosine
  modified_base 70: mod_base = cm
  modified_base 71: mod_base = um
  modified_base 72: mod_base = um
  modified_base 73: mod_base = gm
  modified_base 74: mod_base = OTHER; note = 2'-O-methyladenosine
  modified_base 75: mod_base = OTHER; note = 2'-O-methyladenosine
  modified_base 76: mod_base = OTHER; note = 2'-O-methyladenosine
  modified_base 77: mod_base = OTHER; note = 2'-O-methyladenosine
  modified_base 78: mod_base = OTHER; note = 2'-O-methyladenosine
  modified_base 79: mod_base = gm
  modified_base 80: mod_base = um
  modified_base 81: mod_base = gm
  modified_base 82: mod_base = gm
  modified_base 83: mod_base = cm
  modified_base 84: mod_base = OTHER; note = 2'-O-methyladenosine
  modified_base 85: mod_base = cm
  modified_base 86: mod_base = cm
  modified_base 87: mod_base = gm
  modified_base 88: mod_base = OTHER; note = 2'-O-methyladenosine
  modified_base 89: mod_base = gm
  modified_base 90: mod_base = um
  modified_base 91: mod_base = cm
  modified_base 92: mod_base = gm
  modified_base 93: mod_base = gm
  modified_base 94: mod_base = um
  modified_base 95: mod_base = gm
  modified_base 96: mod_base = cm
  modified_base 111: mod_base = OTHER; note = Phosphorothioate (PS) linkage
  modified_base 111: mod_base = gm
  modified_base 112: mod_base = OTHER; note = Phosphorothioate (PS) linkage
  modified_base 112: mod_base = cm
  modified_base 113: mod_base = OTHER; note = Phosphorothioate (PS) linkage
  modified_base 113: mod_base = OTHER; note = 2'-O-methyladenosine
  source 1..113: mol_type = other RNA

SEQ ID NO: 459 - RNA, 112 nt, synthetic construct; identical to SEQ ID NO: 370
  modified_base 1: mod_base = OTHER; note = 2'-O-methyladenosine
  modified_base 2: mod_base = OTHER; note = Phosphorothioate (PS) linkage
  modified_base 2: mod_base = cm
  modified_base 3: mod_base = OTHER; note = Phosphorothioate (PS) linkage
  modified_base 3: mod_base = um
  modified_base 4: mod_base = OTHER; note = Phosphorothioate (PS) linkage
  modified_base 29: mod_base = gm
  modified_base 30: mod_base = cm
  modified_base 31: mod_base = um
  modified_base 32: mod_base = OTHER; note = 2'-O-methyladenosine
  modified_base 33: mod_base = gm
  modified_base 34: mod_base = OTHER; note = 2'-O-methyladenosine
  modified_base 35: mod_base = OTHER; note = 2'-O-methyladenosine
  modified_base 36: mod_base = OTHER; note = 2'-O-methyladenosine
  modified_base 37: mod_base = um
  modified_base 38: mod_base = OTHER; note = 2'-O-methyladenosine
  modified_base 39: mod_base = gm
  modified_base 40: mod_base = cm
  modified_base 68: mod_base = OTHER; note = 2'-O-methyladenosine
  modified_base 69: mod_base = OTHER; note = 2'-O-methyladenosine
  modified_base 70: mod_base = cm
  modified_base 71: mod_base = um
  modified_base 72: mod_base = um
  modified_base 73: mod_base = gm
  modified_base 74: mod_base = OTHER; note = 2'-O-methyladenosine
  modified_base 75: mod_base = OTHER; note = 2'-O-methyladenosine
  modified_base 76: mod_base = OTHER; note = 2'-O-methyladenosine
  modified_base 77: mod_base = OTHER; note = 2'-O-methyladenosine
  modified_base 78: mod_base = OTHER; note = 2'-O-methyladenosine
  modified_base 79: mod_base = gm
  modified_base 80: mod_base = um
  modified_base 81: mod_base = gm
  modified_base 82: mod_base = gm
  modified_base 83: mod_base = cm
  modified_base 84: mod_base = OTHER; note = 2'-O-methyladenosine
  modified_base 85: mod_base = cm
  modified_base 86: mod_base = cm
  modified_base 87: mod_base = gm
  modified_base 88: mod_base = OTHER; note = 2'-O-methyladenosine
  modified_base 89: mod_base = gm
  modified_base 90: mod_base = um
  modified_base 91: mod_base = cm
  modified_base 92: mod_base = gm
  modified_base 93: mod_base = gm
  modified_base 94: mod_base = um
  modified_base 95: mod_base = gm
  modified_base 96: mod_base = cm
  modified_base 110: mod_base = OTHER; note = Phosphorothioate (PS) linkage
  modified_base 110: mod_base = gm
  modified_base 111: mod_base = OTHER; note = Phosphorothioate (PS) linkage
  modified_base 111: mod_base = gm
  modified_base 112: mod_base = OTHER; note = Phosphorothioate (PS) linkage
  modified_base 112: mod_base = cm
  source 1..112: mol_type = other RNA

SEQ ID NO: 460 - RNA, 111 nt, synthetic construct; identical to SEQ ID NO: 371
  modified_base 1: mod_base = OTHER; note = 2'-O-methyladenosine
  modified_base 2: mod_base = OTHER; note = Phosphorothioate (PS) linkage
  modified_base 2: mod_base = cm
  modified_base 3: mod_base = OTHER; note = Phosphorothioate (PS) linkage
  modified_base 3: mod_base = um
  modified_base 4: mod_base = OTHER; note = Phosphorothioate (PS) linkage
  modified_base 29: mod_base = gm
  modified_base 30: mod_base = cm
  modified_base 31: mod_base = um
  modified_base 32: mod_base = OTHER; note = 2'-O-methyladenosine
  modified_base 33: mod_base = gm
  modified_base 34: mod_base = OTHER; note = 2'-O-methyladenosine
  modified_base 35: mod_base = OTHER; note = 2'-O-methyladenosine
  modified_base 36: mod_base = OTHER; note = 2'-O-methyladenosine
  modified_base 37: mod_base = um
  modified_base 38: mod_base = OTHER; note = 2'-O-methyladenosine
  modified_base 39: mod_base = gm
  modified_base 40: mod_base = cm
  modified_base 68: mod_base = OTHER; note = 2'-O-methyladenosine
  modified_base 69: mod_base = OTHER; note = 2'-O-methyladenosine
  modified_base 70: mod_base = cm
  modified_base 71: mod_base = um
  modified_base 72: mod_base = um
  modified_base 73: mod_base = gm
  modified_base 74: mod_base = OTHER; note = 2'-O-methyladenosine
  modified_base 75: mod_base = OTHER; note = 2'-O-methyladenosine
  modified_base 76: mod_base = OTHER; note = 2'-O-methyladenosine
  modified_base 77: mod_base = OTHER; note = 2'-O-methyladenosine
  modified_base 78: mod_base = OTHER; note = 2'-O-methyladenosine
  modified_base 79: mod_base = gm
  modified_base 80: mod_base = um
  modified_base 81: mod_base = gm
  modified_base 82: mod_base = gm
  modified_base 83: mod_base = cm
  modified_base 84: mod_base = OTHER; note = 2'-O-methyladenosine
  modified_base 85: mod_base = cm
  modified_base 86: mod_base = cm
  modified_base 87: mod_base = gm
  modified_base 88: mod_base = OTHER; note = 2'-O-methyladenosine
  modified_base 89: mod_base = gm
  modified_base 90: mod_base = um
  modified_base 91: mod_base = cm
  modified_base 92: mod_base = gm
  modified_base 93: mod_base = gm
  modified_base 94: mod_base = um
  modified_base 95: mod_base = gm
  modified_base 96: mod_base = cm
  modified_base 109: mod_base = OTHER; note = Phosphorothioate (PS) linkage
  modified_base 109: mod_base = um
  modified_base 110: mod_base = OTHER; note = Phosphorothioate (PS) linkage
  modified_base 110: mod_base = gm
  modified_base 111: mod_base = OTHER; note = Phosphorothioate (PS) linkage
  modified_base 111: mod_base = gm
  source 1..111: mol_type = other RNA

SEQ ID NO: 461 - RNA, 110 nt, synthetic construct; identical to SEQ ID NO: 372
  modified_base 1: mod_base = OTHER; note = 2'-O-methyladenosine
  modified_base 2: mod_base = OTHER; note = Phosphorothioate (PS) linkage
  modified_base 2: mod_base = cm
  modified_base 3: mod_base = OTHER; note = Phosphorothioate (PS) linkage
  modified_base 3: mod_base = um
  modified_base 4: mod_base = OTHER; note = Phosphorothioate (PS) linkage
  modified_base 29: mod_base = gm
  modified_base 30: mod_base = cm
  modified_base 31: mod_base = um
  modified_base 32: mod_base = OTHER; note = 2'-O-methyladenosine
  modified_base 33: mod_base = gm
  modified_base 34: mod_base = OTHER; note = 2'-O-methyladenosine
  modified_base 35: mod_base = OTHER; note = 2'-O-methyladenosine
  modified_base 36: mod_base = OTHER; note = 2'-O-methyladenosine
  modified_base 37: mod_base = um
  modified_base 38: mod_base = OTHER; note = 2'-O-methyladenosine
  modified_base 39: mod_base = gm
  modified_base 40: mod_base = cm
  modified_base 68: mod_base = OTHER; note = 2'-O-methyladenosine
  modified_base 69: mod_base = OTHER; note = 2'-O-methyladenosine
  modified_base 70: mod_base = cm
  modified_base 71: mod_base = um
  modified_base 72: mod_base = um
  modified_base 73: mod_base = gm
  modified_base 74: mod_base = OTHER; note = 2'-O-methyladenosine
  modified_base 75: mod_base = OTHER; note = 2'-O-methyladenosine
  modified_base 76: mod_base = OTHER; note = 2'-O-methyladenosine
  modified_base 77: mod_base = OTHER; note = 2'-O-methyladenosine
  modified_base 78: mod_base = OTHER; note = 2'-O-methyladenosine
  modified_base 79: mod_base = gm
  modified_base 80: mod_base = um
  modified_base 81: mod_base = gm
  modified_base 82: mod_base = gm
  modified_base 83: mod_base = cm
  modified_base 84: mod_base = OTHER; note = 2'-O-methyladenosine
  modified_base 85: mod_base = cm
  modified_base 86: mod_base = cm
  modified_base 87: mod_base = gm
  modified_base 88: mod_base = OTHER; note = 2'-O-methyladenosine
  modified_base 89: mod_base = gm
  modified_base 90: mod_base = um
  modified_base 91: mod_base = cm
  modified_base 92: mod_base = gm
  modified_base 93: mod_base = gm
  modified_base 94: mod_base = um
  modified_base 95: mod_base = gm
  modified_base 96: mod_base = cm
  modified_base 108: mod_base = OTHER; note = Phosphorothioate (PS) linkage
  modified_base 108: mod_base = gm
  modified_base 109: mod_base = OTHER; note = Phosphorothioate (PS) linkage
  modified_base 109: mod_base = um
  modified_base 110: mod_base = OTHER; note = Phosphorothioate (PS) linkage
  modified_base 110: mod_base = gm
  source 1..110: mol_type = other RNA

SEQ ID NO: 462 - RNA, 120 nt, synthetic construct; identical to SEQ ID NO: 373
  modified_base 1: mod_base = OTHER; note = 2'-O-methyladenosine
  modified_base 2: mod_base = OTHER; note = Phosphorothioate (PS) linkage
  modified_base 2: mod_base = cm
  modified_base 3: mod_base = OTHER; note = Phosphorothioate (PS) linkage
  modified_base 3: mod_base = um
  modified_base 4: mod_base = OTHER; note = Phosphorothioate (PS) linkage
  modified_base 29: mod_base = gm
  modified_base 30: mod_base = cm
  modified_base 31: mod_base = um
  modified_base 32: mod_base = OTHER; note = 2'-O-methyladenosine
  modified_base 33: mod_base = gm
  modified_base 34: mod_base = OTHER; note = 2'-O-methyladenosine
  modified_base 35: mod_base = OTHER; note = 2'-O-methyladenosine
  modified_base 36: mod_base = OTHER; note = 2'-O-methyladenosine
  modified_base 37: mod_base = um
  modified_base 38: mod_base = OTHER; note = 2'-O-methyladenosine
  modified_base 39: mod_base = gm
  modified_base 40: mod_base = cm
  modified_base 68: mod_base = OTHER; note = 2'-O-methyladenosine
  modified_base 69: mod_base = OTHER; note = 2'-O-methyladenosine
  modified_base 70: mod_base = cm
  modified_base 71: mod_base = um
  modified_base 72: mod_base = um
  modified_base 73: mod_base = gm
  modified_base 74: mod_base = OTHER; note = 2'-O-methyladenosine
  modified_base 75: mod_base = OTHER; note = 2'-O-methyladenosine
  modified_base 76: mod_base = OTHER; note = 2'-O-methyladenosine
  modified_base 77: mod_base = OTHER; note = 2'-O-methyladenosine
  modified_base 78: mod_base = OTHER; note = 2'-O-methyladenosine
  modified_base 79: mod_base = gm
  modified_base 80: mod_base = um
  modified_base 81: mod_base = gm
  modified_base 82: mod_base = gm
  modified_base 83: mod_base = cm
  modified_base 84: mod_base = OTHER; note = 2'-O-methyladenosine
  modified_base 85: mod_base = cm
  modified_base 86: mod_base = cm
  modified_base 87: mod_base = gm
  modified_base 88: mod_base = OTHER; note = 2'-O-methyladenosine
  modified_base 89: mod_base = gm
  modified_base 90: mod_base = um
  modified_base 91: mod_base = cm
  modified_base 92: mod_base = gm
  modified_base 93: mod_base = gm
  modified_base 94: mod_base = um
  modified_base 95: mod_base = gm
  modified_base 96: mod_base = cm
  modified_base 118: mod_base = OTHER; note = Phosphorothioate (PS) linkage
  modified_base 118: mod_base = OTHER; note = 2'-O-methyladenosine
  modified_base 119: mod_base = OTHER; note = Phosphorothioate (PS) linkage
  modified_base 119: mod_base = OTHER; note = 2'-O-methyladenosine
  modified_base 120: mod_base = OTHER; note = Phosphorothioate (PS) linkage
  modified_base 120: mod_base = OTHER; note = 2'-O-methyladenosine
  source 1..120: mol_type = other RNA

SEQ ID NO: 463 - RNA, 119 nt, synthetic construct; identical to SEQ ID NO: 374
  modified_base 1: mod_base = OTHER; note = 2'-O-methyladenosine
  modified_base 2: mod_base = OTHER; note = Phosphorothioate (PS) linkage
  modified_base 2: mod_base = cm
  modified_base 3: mod_base = OTHER; note = Phosphorothioate (PS) linkage
  modified_base 3: mod_base = um
  modified_base 4: mod_base = OTHER; note = Phosphorothioate (PS) linkage
  modified_base 29: mod_base = gm
  modified_base 30: mod_base = cm
  modified_base 31: mod_base = um
  modified_base 32: mod_base = OTHER; note = 2'-O-methyladenosine
  modified_base 33: mod_base = gm
  modified_base 34: mod_base = OTHER; note = 2'-O-methyladenosine
  modified_base 35: mod_base = OTHER; note = 2'-O-methyladenosine
  modified_base 36: mod_base = OTHER; note = 2'-O-methyladenosine
  modified_base 37: mod_base = um
  modified_base 38: mod_base = OTHER; note = 2'-O-methyladenosine
  modified_base 39: mod_base = gm
  modified_base 40: mod_base = cm
  modified_base 68: mod_base = OTHER; note = 2'-O-methyladenosine
  modified_base 69: mod_base = OTHER; note = 2'-O-methyladenosine
  modified_base 70: mod_base = cm
  modified_base 71: mod_base = um
  modified_base 72: mod_base = um
  modified_base 73: mod_base = gm
  modified_base 74: mod_base = OTHER; note = 2'-O-methyladenosine
  modified_base 75: mod_base = OTHER; note = 2'-O-methyladenosine
  modified_base 76: mod_base = OTHER; note = 2'-O-methyladenosine
  modified_base 77: mod_base = OTHER; note = 2'-O-methyladenosine
  modified_base 78: mod_base = OTHER; note = 2'-O-methyladenosine
  modified_base 79: mod_base = gm
  modified_base 80: mod_base = um
  modified_base 81: mod_base = gm
  modified_base 82: mod_base = gm
  modified_base 83: mod_base = cm
  modified_base 84: mod_base = OTHER; note = 2'-O-methyladenosine
  modified_base 85: mod_base = cm
  modified_base 86: mod_base = cm
  modified_base 87: mod_base = gm
  modified_base 88: mod_base = OTHER; note = 2'-O-methyladenosine
  modified_base 89: mod_base = gm
  modified_base 90: mod_base = um
  modified_base 91: mod_base = cm
  modified_base 92: mod_base = gm
  modified_base 93: mod_base = gm
  modified_base 94: mod_base = um
  modified_base 95: mod_base = gm
  modified_base 96: mod_base = cm
  modified_base 117: mod_base = OTHER; note = Phosphorothioate (PS) linkage
  modified_base 117: mod_base = cm
  modified_base 118: mod_base = OTHER; note = Phosphorothioate (PS) linkage
  modified_base 118: mod_base = OTHER; note = 2'-O-methyladenosine
  modified_base 119: mod_base = OTHER; note = Phosphorothioate (PS) linkage
  modified_base 119: mod_base = OTHER; note = 2'-O-methyladenosine
  source 1..119: mol_type = other RNA

SEQ ID NO: 464 - RNA, 118 nt, synthetic construct; identical to SEQ ID NO: 375
  modified_base 1: mod_base = OTHER; note = 2'-O-methyladenosine
  modified_base 2: mod_base = OTHER; note = Phosphorothioate (PS) linkage
  modified_base 2: mod_base = cm
  modified_base 3: mod_base = OTHER; note = Phosphorothioate (PS) linkage
  modified_base 3: mod_base = um
  modified_base 4: mod_base = OTHER; note = Phosphorothioate (PS) linkage
  modified_base 29: mod_base = gm
  modified_base 30: mod_base = cm
  modified_base 31: mod_base = um
  modified_base 32: mod_base = OTHER; note = 2'-O-methyladenosine
  modified_base 33: mod_base = gm
  modified_base 34: mod_base = OTHER; note = 2'-O-methyladenosine
  modified_base 35: mod_base = OTHER; note = 2'-O-methyladenosine
  modified_base 36: mod_base = OTHER; note = 2'-O-methyladenosine
  modified_base 37: mod_base = um
  modified_base 38: mod_base = OTHER; note = 2'-O-methyladenosine
  modified_base 39: mod_base = gm
  modified_base 40: mod_base = cm
  modified_base 68: mod_base = OTHER; note = 2'-O-methyladenosine
  modified_base 69: mod_base = OTHER; note = 2'-O-methyladenosine
  modified_base 70: mod_base = cm
  modified_base 71: mod_base = um
  modified_base 72: mod_base = um
  modified_base 73: mod_base = gm
  modified_base 74: mod_base = OTHER; note = 2'-O-methyladenosine
  modified_base 75: mod_base = OTHER; note = 2'-O-methyladenosine
  modified_base 76: mod_base = OTHER; note = 2'-O-methyladenosine
  modified_base 77: mod_base = OTHER; note = 2'-O-methyladenosine
  modified_base 78: mod_base = OTHER; note = 2'-O-methyladenosine
  modified_base 79: mod_base = gm
  modified_base 80: mod_base = um
  modified_base 81: mod_base = gm
  modified_base 82: mod_base = gm
  modified_base 83: mod_base = cm
  modified_base 84: mod_base = OTHER; note = 2'-O-methyladenosine
  modified_base 85: mod_base = cm
  modified_base 86: mod_base = cm
  modified_base 87: mod_base = gm
  modified_base 88: mod_base = OTHER; note = 2'-O-methyladenosine
  modified_base 89: mod_base = gm
  modified_base 90: mod_base = um
  modified_base 91: mod_base = cm
  modified_base 92: mod_base = gm
  modified_base 93: mod_base = gm
  modified_base 94: mod_base = um
  modified_base 95: mod_base = gm
  modified_base 96: mod_base = cm
  modified_base 116: mod_base = OTHER; note = Phosphorothioate (PS) linkage
  modified_base 116: mod_base = gm
  modified_base 117: mod_base = OTHER; note = Phosphorothioate (PS) linkage
  modified_base 117: mod_base = cm
  modified_base 118: mod_base = OTHER; note = Phosphorothioate (PS) linkage
  modified_base 118: mod_base = OTHER; note = 2'-O-methyladenosine
  source 1..118: mol_type = other RNA

SEQ ID NO: 465 - RNA, 117 nt, synthetic construct; identical to SEQ ID NO: 376
  modified_base 1: mod_base = OTHER; note = 2'-O-methyladenosine
  modified_base 2: mod_base = OTHER; note = Phosphorothioate (PS) linkage
  modified_base 2: mod_base = cm
  modified_base 3: mod_base = OTHER; note = Phosphorothioate (PS) linkage
  modified_base 3: mod_base = um
  modified_base 4: mod_base = OTHER; note = Phosphorothioate (PS) linkage
  modified_base 29: mod_base = gm
  modified_base 30: mod_base = cm
  modified_base 31: mod_base = um
  modified_base 32: mod_base = OTHER; note = 2'-O-methyladenosine
  modified_base 33: mod_base = gm
  modified_base 34: mod_base = OTHER; note = 2'-O-methyladenosine
  modified_base 35: mod_base = OTHER; note = 2'-O-methyladenosine
  modified_base 36: mod_base = OTHER; note = 2'-O-methyladenosine
  modified_base 37: mod_base = um
  modified_base 38: mod_base = OTHER; note = 2'-O-methyladenosine
  modified_base 39: mod_base = gm
  modified_base 40: mod_base = cm
  modified_base 68: mod_base = OTHER; note = 2'-O-methyladenosine
  modified_base 69: mod_base = OTHER; note = 2'-O-methyladenosine
  modified_base 70: mod_base = cm
  modified_base 71: mod_base = um
  modified_base 72: mod_base = um
  modified_base 73: mod_base = gm
  modified_base 74: mod_base = OTHER; note = 2'-O-methyladenosine
  modified_base 75: mod_base = OTHER; note = 2'-O-methyladenosine
  modified_base 76: mod_base = OTHER; note = 2'-O-methyladenosine
  modified_base 77: mod_base = OTHER; note = 2'-O-methyladenosine
  modified_base 78: mod_base = OTHER; note = 2'-O-methyladenosine
  modified_base 79: mod_base = gm
  modified_base 80: mod_base = um
  modified_base 81: mod_base = gm
  modified_base 82: mod_base = gm
  modified_base 83: mod_base = cm
  modified_base 84: mod_base = OTHER; note = 2'-O-methyladenosine
  modified_base 85: mod_base = cm
  modified_base 86: mod_base = cm
  modified_base 87: mod_base = gm
  modified_base 88: mod_base = OTHER; note = 2'-O-methyladenosine
  modified_base 89: mod_base = gm
  modified_base 90: mod_base = um
  modified_base 91: mod_base = cm
  modified_base 92: mod_base = gm
  modified_base 93: mod_base = gm
  modified_base 94: mod_base = um
  modified_base 95: mod_base = gm
  modified_base 96: mod_base = cm
  modified_base 115: mod_base = OTHER; note = Phosphorothioate (PS) linkage
  modified_base 115: mod_base = OTHER; note = 2'-O-methyladenosine
  modified_base 116: mod_base = OTHER; note = Phosphorothioate (PS) linkage
  modified_base 116: mod_base = gm
  modified_base 117: mod_base = OTHER; note = Phosphorothioate (PS) linkage
  modified_base 117: mod_base = cm
  source 1..117: mol_type = other RNA

SEQ ID NO: 466 - RNA, 116 nt, synthetic construct; identical to SEQ ID NO: 377
  modified_base 1: mod_base = OTHER; note = 2'-O-methyladenosine
  modified_base 2: mod_base = OTHER; note = Phosphorothioate (PS) linkage
  modified_base 2: mod_base = cm
  modified_base 3: mod_base = OTHER; note = Phosphorothioate (PS) linkage
  modified_base 3: mod_base = um
  modified_base 4: mod_base = OTHER; note = Phosphorothioate (PS) linkage
  modified_base 29: mod_base = gm
  modified_base 30: mod_base = cm
  modified_base 31: mod_base = um
  modified_base 32: mod_base = OTHER; note = 2'-O-methyladenosine
  modified_base 33: mod_base = gm
  modified_base 34: mod_base = OTHER; note = 2'-O-methyladenosine
  modified_base 35: mod_base = OTHER; note = 2'-O-methyladenosine
  modified_base 36: mod_base = OTHER; note = 2'-O-methyladenosine
  modified_base 37: mod_base = um
  modified_base 38: mod_base = OTHER; note = 2'-O-methyladenosine
  modified_base 39: mod_base = gm
  modified_base 40: mod_base = cm
  modified_base 68: mod_base = OTHER; note = 2'-O-methyladenosine
  modified_base 69: mod_base = OTHER; note = 2'-O-methyladenosine
  modified_base 70: mod_base = cm
  modified_base 71: mod_base = um
  modified_base 72: mod_base = um
  modified_base 73: mod_base = gm
  modified_base 74: mod_base = OTHER; note = 2'-O-methyladenosine
  modified_base 75: mod_base = OTHER; note = 2'-O-methyladenosine
  modified_base 76: mod_base = OTHER; note = 2'-O-methyladenosine
  modified_base 77: mod_base = OTHER; note = 2'-O-methyladenosine
  modified_base 78: mod_base = OTHER; note = 2'-O-methyladenosine
  modified_base 79: mod_base = gm
  modified_base 80: mod_base = um
  modified_base 81: mod_base = gm
  modified_base 82: mod_base = gm
  modified_base 83: mod_base = cm
  modified_base 84: mod_base = OTHER; note = 2'-O-methyladenosine
  modified_base 85: mod_base = cm
  modified_base 86: mod_base = cm
  modified_base 87: mod_base = gm
  modified_base 88: mod_base = OTHER; note = 2'-O-methyladenosine
  modified_base 89: mod_base = gm
  modified_base 90: mod_base = um
  modified_base 91: mod_base = cm
  modified_base 92: mod_base = gm
  modified_base 93: mod_base = gm
  modified_base 94: mod_base = um
  modified_base 95: mod_base = gm
  modified_base 96: mod_base = cm
  modified_base 114: mod_base = OTHER; note = Phosphorothioate (PS) linkage
  modified_base 114: mod_base = cm
  modified_base 115: mod_base = OTHER; note = Phosphorothioate (PS) linkage
  modified_base 115: mod_base = OTHER; note = 2'-O-methyladenosine
  modified_base 116: mod_base = OTHER; note = Phosphorothioate (PS) linkage
  modified_base 116: mod_base = gm
  source 1..116: mol_type = other RNA

SEQ ID NO: 467 - RNA, 115 nt, synthetic construct; identical to SEQ ID NO: 378
  modified_base 1: mod_base = OTHER; note = 2'-O-methyladenosine
  modified_base 2: mod_base = OTHER; note = Phosphorothioate (PS) linkage
  modified_base 2: mod_base = cm
  modified_base 3: mod_base = OTHER; note = Phosphorothioate (PS) linkage
  modified_base 3: mod_base = um
  modified_base 4: mod_base = OTHER; note = Phosphorothioate (PS) linkage
  modified_base 29: mod_base = gm
  modified_base 30: mod_base = cm
  modified_base 31: mod_base = um
  modified_base 32: mod_base = OTHER; note = 2'-O-methyladenosine
  modified_base 33: mod_base = gm
  modified_base 34: mod_base = OTHER; note = 2'-O-methyladenosine
  modified_base 35: mod_base = OTHER; note = 2'-O-methyladenosine
  modified_base 36: mod_base = OTHER; note = 2'-O-methyladenosine
  modified_base 37: mod_base = um
  modified_base 38: mod_base = OTHER; note = 2'-O-methyladenosine
  modified_base 39: mod_base = gm
  modified_base 40: mod_base = cm
  modified_base 68: mod_base = OTHER; note = 2'-O-methyladenosine
  modified_base 69: mod_base = OTHER; note = 2'-O-methyladenosine
  modified_base 70: mod_base = cm
  modified_base 71: mod_base = um
  modified_base 72: mod_base = um
  modified_base 73: mod_base = gm
  modified_base 74: mod_base = OTHER; note = 2'-O-methyladenosine
  modified_base 75: mod_base = OTHER; note = 2'-O-methyladenosine
  modified_base 76: mod_base = OTHER; note = 2'-O-methyladenosine
  modified_base 77: mod_base = OTHER; note = 2'-O-methyladenosine
  modified_base 78: mod_base = OTHER; note = 2'-O-methyladenosine
  modified_base 79: mod_base = gm
  modified_base 80: mod_base = um
  modified_base 81: mod_base = gm
  modified_base 82: mod_base = gm
  modified_base 83: mod_base = cm
  modified_base 84: mod_base = OTHER; note = 2'-O-methyladenosine
  modified_base 85: mod_base = cm
  modified_base 86: mod_base = cm
  modified_base 87: mod_base = gm
  modified_base 88: mod_base = OTHER; note = 2'-O-methyladenosine
  modified_base 89: mod_base = gm
  modified_base 90: mod_base = um
  modified_base 91: mod_base = cm
  modified_base 92: mod_base = gm
  modified_base 93: mod_base = gm
  modified_base 94: mod_base = um
  modified_base 95: mod_base = gm
  modified_base 96: mod_base = cm
  modified_base 113: mod_base = OTHER; note = Phosphorothioate (PS) linkage
  modified_base 113: mod_base = gm
  modified_base 114: mod_base = OTHER; note = Phosphorothioate (PS) linkage
  modified_base 114: mod_base = cm
  modified_base 115: mod_base = OTHER; note = Phosphorothioate (PS) linkage
  modified_base 115: mod_base = OTHER; note = 2'-O-methyladenosine
  source 1..115: mol_type = other RNA

SEQ ID NO: 468 - RNA, 114 nt, synthetic construct; identical to SEQ ID NO: 379
  modified_base 1: mod_base = OTHER; note = 2'-O-methyladenosine
  modified_base 2: mod_base = OTHER; note = Phosphorothioate (PS) linkage
  modified_base 2: mod_base = cm
  modified_base 3: mod_base = OTHER; note = Phosphorothioate (PS) linkage
  modified_base 3: mod_base = um
  modified_base 4: mod_base = OTHER; note = Phosphorothioate (PS) linkage
  modified_base 29: mod_base = gm
  modified_base 30: mod_base = cm
  modified_base 31: mod_base = um
  modified_base 32: mod_base = OTHER; note = 2'-O-methyladenosine
  modified_base 33: mod_base = gm
  modified_base 34: mod_base = OTHER; note = 2'-O-methyladenosine
  modified_base 35: mod_base = OTHER; note = 2'-O-methyladenosine
  modified_base 36: mod_base = OTHER; note = 2'-O-methyladenosine
  modified_base 37: mod_base = um
  modified_base 38: mod_base = OTHER; note = 2'-O-methyladenosine
  modified_base 39: mod_base = gm
  modified_base 40: mod_base = cm
  modified_base 68: mod_base = OTHER; note = 2'-O-methyladenosine
  modified_base 69: mod_base = OTHER; note = 2'-O-methyladenosine
  modified_base 70: mod_base = cm
  modified_base 71: mod_base = um
  modified_base 72: mod_base = um
  modified_base 73: mod_base = gm
  modified_base 74: mod_base = OTHER; note = 2'-O-methyladenosine
  modified_base 75: mod_base = OTHER; note = 2'-O-methyladenosine
  modified_base 76: mod_base = OTHER; note = 2'-O-methyladenosine
  modified_base 77: mod_base = OTHER; note = 2'-O-methyladenosine
  modified_base 78: mod_base = OTHER; note = 2'-O-methyladenosine
  modified_base 79: mod_base = gm
  modified_base 80: mod_base = um
  modified_base 81: mod_base = gm
  modified_base 82: mod_base = gm
  modified_base 83: mod_base = cm
  modified_base 84: mod_base = OTHER; note = 2'-O-methyladenosine
  modified_base 85: mod_base = cm
  modified_base 86: mod_base = cm
  modified_base 87: mod_base = gm
  modified_base 88: mod_base = OTHER; note = 2'-O-methyladenosine
  modified_base 89: mod_base = gm
  modified_base 90: mod_base = um
  modified_base 91: mod_base = cm
  modified_base 92: mod_base = gm
  modified_base 93: mod_base = gm
  modified_base 94: mod_base = um
  modified_base 95: mod_base = gm
  modified_base 96: mod_base = cm
  modified_base 112: mod_base = OTHER; note = Phosphorothioate (PS) linkage
  modified_base 112: mod_base = gm
  modified_base 113: mod_base = OTHER; note = Phosphorothioate (PS) linkage
  modified_base 113: mod_base = gm
  modified_base 114: mod_base = OTHER; note = Phosphorothioate (PS) linkage
  modified_base 114: mod_base = cm
  source 1..114: mol_type = other RNA

SEQ ID NO: 469 - RNA, 113 nt, synthetic construct; identical to SEQ ID NO: 380
  modified_base 1: mod_base = OTHER; note = 2'-O-methyladenosine
  modified_base 2: mod_base = OTHER; note = Phosphorothioate (PS) linkage
  modified_base 2: mod_base = cm
  modified_base 3: mod_base = OTHER; note = Phosphorothioate (PS) linkage
  modified_base 3: mod_base = um
  modified_base 4: mod_base = OTHER; note = Phosphorothioate (PS) linkage
  modified_base 29: mod_base = gm
  modified_base 30: mod_base = cm
  modified_base 31: mod_base = um
  modified_base 32: mod_base = OTHER; note = 2'-O-methyladenosine
  modified_base 33: mod_base = gm
  modified_base 34: mod_base = OTHER; note = 2'-O-methyladenosine
  modified_base 35: mod_base = OTHER; note = 2'-O-methyladenosine
  modified_base 36: mod_base = OTHER; note = 2'-O-methyladenosine
  modified_base 37: mod_base = um
  modified_base 38: mod_base = OTHER; note = 2'-O-methyladenosine
  modified_base 39: mod_base = gm
  modified_base 40: mod_base = cm
  modified_base 68: mod_base = OTHER; note = 2'-O-methyladenosine
  modified_base 69: mod_base = OTHER; note = 2'-O-methyladenosine
  modified_base 70: mod_base = cm
  modified_base 71: mod_base = um
  modified_base 72: mod_base = um
  modified_base 73: mod_base = gm
  modified_base 74: mod_base = OTHER; note = 2'-O-methyladenosine
  modified_base 75: mod_base = OTHER; note = 2'-O-methyladenosine
  modified_base 76: mod_base = OTHER; note = 2'-O-methyladenosine
  modified_base 77: mod_base = OTHER; note = 2'-O-methyladenosine
  modified_base 78: mod_base = OTHER; note = 2'-O-methyladenosine
  modified_base 79: mod_base = gm
  modified_base 80: mod_base = um
  modified_base 81: mod_base = gm
  modified_base 82: mod_base = gm
  modified_base 83: mod_base = cm
  modified_base 84: mod_base = OTHER; note = 2'-O-methyladenosine
  modified_base 85: mod_base = cm
  modified_base 86: mod_base = cm
  modified_base 87: mod_base = gm
  modified_base 88: mod_base = OTHER; note = 2'-O-methyladenosine
  modified_base 89: mod_base = gm
  modified_base 90: mod_base = um
  modified_base 91: mod_base = cm
  modified_base 92: mod_base = gm
  modified_base 93: mod_base = gm
  modified_base 94: mod_base = um
  modified_base 95: mod_base = gm
  modified_base 96: mod_base = cm
  modified_base 111: mod_base = OTHER; note = Phosphorothioate (PS) linkage
  modified_base 111: mod_base = um
  modified_base 112: mod_base = OTHER; note = Phosphorothioate (PS) linkage
  modified_base 112: mod_base = gm
  modified_base 113: mod_base = OTHER; note = Phosphorothioate (PS) linkage
  modified_base 113: mod_base = gm
  source 1..113: mol_type = other RNA

SEQ ID NO: 470 - RNA, 112 nt, synthetic construct; identical to SEQ ID NO: 381
  modified_base 1: mod_base = OTHER; note = 2'-O-methyladenosine
  modified_base 2: mod_base = OTHER; note = Phosphorothioate (PS) linkage
  modified_base 2: mod_base = cm
  modified_base 3: mod_base = OTHER; note = Phosphorothioate (PS) linkage
  modified_base 3: mod_base = um
  modified_base 4: mod_base = OTHER; note = Phosphorothioate (PS) linkage
  modified_base 29: mod_base = gm
  modified_base 30: mod_base = cm
  modified_base 31: mod_base = um
  modified_base 32: mod_base = OTHER; note = 2'-O-methyladenosine
  modified_base 33: mod_base = gm
  modified_base 34: mod_base = OTHER; note = 2'-O-methyladenosine
  modified_base 35: mod_base = OTHER; note = 2'-O-methyladenosine
  modified_base 36: mod_base = OTHER; note = 2'-O-methyladenosine
  modified_base 37: mod_base = um
  modified_base 38: mod_base = OTHER; note = 2'-O-methyladenosine
  modified_base 39: mod_base = gm
  modified_base 40: mod_base = cm
  modified_base 68: mod_base = OTHER; note = 2'-O-methyladenosine
  modified_base 69: mod_base = OTHER; note = 2'-O-methyladenosine
  modified_base 70: mod_base = cm
  modified_base 71: mod_base = um
  modified_base 72: mod_base = um
  modified_base 73: mod_base = gm
  modified_base 74: mod_base = OTHER; note = 2'-O-methyladenosine
  modified_base 75: mod_base = OTHER; note = 2'-O-methyladenosine
  modified_base 76: mod_base = OTHER; note = 2'-O-methyladenosine
  modified_base 77: mod_base = OTHER; note = 2'-O-methyladenosine
  modified_base 78: mod_base = OTHER; note = 2'-O-methyladenosine
  modified_base 79: mod_base = gm
  modified_base 80: mod_base = um
  modified_base 81: mod_base = gm
  modified_base 82: mod_base = gm
  modified_base 83: mod_base = cm
  modified_base 84: mod_base = OTHER; note = 2'-O-methyladenosine
  modified_base 85: mod_base = cm
  modified_base 86: mod_base = cm
  modified_base 87: mod_base = gm
  modified_base 88: mod_base = OTHER; note = 2'-O-methyladenosine
  modified_base 89: mod_base = gm
  modified_base 90: mod_base = um
  modified_base 91: mod_base = cm
  modified_base 92: mod_base = gm
  modified_base 93: mod_base = gm
  modified_base 94: mod_base = um
  modified_base 95: mod_base = gm
  modified_base 96: mod_base = cm
  modified_base 110: mod_base = OTHER; note = Phosphorothioate (PS) linkage
  modified_base 110: mod_base = gm
  modified_base 111: mod_base = OTHER; note = Phosphorothioate (PS) linkage
  modified_base 111: mod_base = um
  modified_base 112: mod_base = OTHER; note = Phosphorothioate (PS) linkage
  modified_base 112: mod_base = gm
  source 1..112: mol_type = other RNA

SEQ ID NO: 471 - RNA, 122 nt, synthetic construct; identical to SEQ ID NO: 382
  modified_base 1: mod_base = OTHER; note = 2'-O-methyladenosine
  modified_base 2: mod_base = OTHER; note = Phosphorothioate (PS) linkage
  modified_base 2: mod_base = cm
  modified_base 3: mod_base = OTHER; note = Phosphorothioate (PS) linkage
  modified_base 3: mod_base = um
  modified_base 4: mod_base = OTHER; note = Phosphorothioate (PS) linkage
  modified_base 29: mod_base = gm
  modified_base 30: mod_base = cm
  modified_base 31: mod_base = um
  modified_base 32: mod_base = OTHER; note = 2'-O-methyladenosine
  modified_base 33: mod_base = gm
  modified_base 34: mod_base = OTHER; note = 2'-O-methyladenosine
  modified_base 35: mod_base = OTHER; note = 2'-O-methyladenosine
  modified_base 36: mod_base = OTHER; note = 2'-O-methyladenosine
  modified_base 37: mod_base = um
  modified_base 38: mod_base = OTHER; note = 2'-O-methyladenosine
  modified_base 39: mod_base = gm
  modified_base 40: mod_base = cm
  modified_base 68: mod_base = OTHER; note = 2'-O-methyladenosine
  modified_base 69: mod_base = OTHER; note = 2'-O-methyladenosine
  modified_base 70: mod_base = cm
  modified_base 71: mod_base = um
  modified_base 72: mod_base = um
  modified_base 73: mod_base = gm
  modified_base 74: mod_base = OTHER; note = 2'-O-methyladenosine
  modified_base 75: mod_base = OTHER; note = 2'-O-methyladenosine
  modified_base 76: mod_base = OTHER; note = 2'-O-methyladenosine
  modified_base 77: mod_base = OTHER; note = 2'-O-methyladenosine
  modified_base 78: mod_base = OTHER; note = 2'-O-methyladenosine
  modified_base 79: mod_base = gm
  modified_base 80: mod_base = um
  modified_base 81: mod_base = gm
  modified_base 82: mod_base = gm
  modified_base 83: mod_base = cm
  modified_base 84: mod_base = OTHER; note = 2'-O-methyladenosine
  modified_base 85: mod_base = cm
  modified_base 86: mod_base = cm
  modified_base 87: mod_base = gm
  modified_base 88: mod_base = OTHER; note = 2'-O-methyladenosine
  modified_base 89: mod_base = gm
  modified_base 90: mod_base = um
  modified_base 91: mod_base = cm
  modified_base 92: mod_base = gm
  modified_base 93: mod_base = gm
  modified_base 94: mod_base = um
  modified_base 95: mod_base = gm
  modified_base 96: mod_base = cm
  modified_base 120: mod_base = OTHER; note = Phosphorothioate (PS) linkage
  modified_base 120: mod_base = OTHER; note = 2'-O-methyladenosine
  modified_base 121: mod_base = OTHER; note = Phosphorothioate (PS) linkage
  modified_base 121: mod_base = OTHER; note = 2'-O-methyladenosine
  modified_base 122: mod_base = OTHER; note = Phosphorothioate (PS) linkage
  modified_base 122: mod_base = OTHER; note = 2'-O-methyladenosine
  source 1..122: mol_type = other RNA

SEQ ID NO: 472 - RNA, 121 nt, synthetic construct; identical to SEQ ID NO: 383
  modified_base 1: mod_base = OTHER; note = 2'-O-methyladenosine
  modified_base 2: mod_base = OTHER; note = Phosphorothioate (PS) linkage
  modified_base 2: mod_base = cm
  modified_base 3: mod_base = OTHER; note = Phosphorothioate (PS) linkage
  modified_base 3: mod_base = um
  modified_base 4: mod_base = OTHER; note = Phosphorothioate (PS) linkage
  modified_base 29: mod_base = gm
  modified_base 30: mod_base = cm
  modified_base 31: mod_base = um
  modified_base 32: mod_base = OTHER; note = 2'-O-methyladenosine
  modified_base 33: mod_base = gm
  modified_base 34: mod_base = OTHER; note = 2'-O-methyladenosine
  modified_base 35: mod_base = OTHER; note = 2'-O-methyladenosine
  modified_base 36: mod_base = OTHER; note = 2'-O-methyladenosine
  modified_base 37: mod_base = um
  modified_base 38: mod_base = OTHER; note = 2'-O-methyladenosine
  modified_base 39: mod_base = gm
  modified_base 40: mod_base = cm
  modified_base 68: mod_base = OTHER; note = 2'-O-methyladenosine
  modified_base 69: mod_base = OTHER; note = 2'-O-methyladenosine
  modified_base 70: mod_base = cm
  modified_base 71: mod_base = um
  modified_base 72: mod_base = um
  modified_base 73: mod_base = gm
  modified_base 74: mod_base = OTHER; note = 2'-O-methyladenosine
  modified_base 75: mod_base = OTHER; note = 2'-O-methyladenosine
  modified_base 76: mod_base = OTHER; note = 2'-O-methyladenosine
  modified_base 77: mod_base = OTHER; note = 2'-O-methyladenosine
  modified_base 78: mod_base = OTHER; note = 2'-O-methyladenosine
  modified_base 79: mod_base = gm
  modified_base 80: mod_base = um
  modified_base 81: mod_base = gm
  modified_base 82: mod_base = gm
  modified_base 83: mod_base = cm
  modified_base 84: mod_base = OTHER; note = 2'-O-methyladenosine
  modified_base 85: mod_base = cm
  modified_base 86: mod_base = cm
  modified_base 87: mod_base = gm
  modified_base 88: mod_base = OTHER; note = 2'-O-methyladenosine
  modified_base 89: mod_base = gm
  modified_base 90: mod_base = um
  modified_base 91: mod_base = cm
  modified_base 92: mod_base = gm
  modified_base 93: mod_base = gm
  modified_base 94: mod_base = um
  modified_base 95: mod_base = gm
  modified_base 96: mod_base = cm
  modified_base 119: mod_base = OTHER; note = Phosphorothioate (PS) linkage
  modified_base 119: mod_base = cm
  modified_base 120: mod_base = OTHER; note = Phosphorothioate (PS) linkage
  modified_base 120: mod_base = OTHER; note = 2'-O-methyladenosine
  modified_base 121: mod_base = OTHER; note = Phosphorothioate (PS) linkage
  modified_base 121: mod_base = OTHER; note = 2'-O-methyladenosine
  source 1..121: mol_type = other RNA

SEQ ID NO: 473 - RNA, 120 nt, synthetic construct; identical to SEQ ID NO: 384
  modified_base 1: mod_base = OTHER; note = 2'-O-methyladenosine
  modified_base 2: mod_base = OTHER; note = Phosphorothioate (PS) linkage
  modified_base 2: mod_base = cm
  modified_base 3: mod_base = OTHER; note = Phosphorothioate (PS) linkage
  modified_base 3: mod_base = um
  modified_base 4: mod_base = OTHER; note = Phosphorothioate (PS) linkage
  modified_base 29: mod_base = gm
  modified_base 30: mod_base = cm
  modified_base 31: mod_base = um
  modified_base 32: mod_base = OTHER; note = 2'-O-methyladenosine
  modified_base 33: mod_base = gm
  modified_base 34: mod_base = OTHER; note = 2'-O-methyladenosine
  modified_base 35: mod_base = OTHER; note = 2'-O-methyladenosine
  modified_base 36: mod_base = OTHER; note = 2'-O-methyladenosine
  modified_base 37: mod_base = um
  modified_base 38: mod_base = OTHER; note = 2'-O-methyladenosine
  modified_base 39: mod_base = gm
  modified_base 40: mod_base = cm
  modified_base 68: mod_base = OTHER; note = 2'-O-methyladenosine
  modified_base 69: mod_base = OTHER; note = 2'-O-methyladenosine
  modified_base 70: mod_base = cm
  modified_base 71: mod_base = um
  modified_base 72: mod_base = um
  modified_base 73: mod_base = gm
  modified_base 74: mod_base = OTHER; note = 2'-O-methyladenosine
  modified_base 75: mod_base = OTHER; note = 2'-O-methyladenosine
  modified_base 76: mod_base = OTHER; note = 2'-O-methyladenosine
  modified_base 77: mod_base = OTHER; note = 2'-O-methyladenosine
  modified_base 78: mod_base = OTHER; note = 2'-O-methyladenosine
  modified_base 79: mod_base = gm
  modified_base 80: mod_base = um
  modified_base 81: mod_base = gm
  modified_base 82: mod_base = gm
  modified_base 83: mod_base = cm
  modified_base 84: mod_base = OTHER; note = 2'-O-methyladenosine
  modified_base 85: mod_base = cm
  modified_base 86: mod_base = cm
  modified_base 87: mod_base = gm
  modified_base 88: mod_base = OTHER; note = 2'-O-methyladenosine
  modified_base 89: mod_base = gm
  modified_base 90: mod_base = um
  modified_base 91: mod_base = cm
  modified_base 92: mod_base = gm
  modified_base 93: mod_base = gm
  modified_base 94: mod_base = um
  modified_base 95: mod_base = gm
  modified_base 96: mod_base = cm
  modified_base 118: mod_base = OTHER; note = Phosphorothioate (PS) linkage
  modified_base 118: mod_base = gm
  modified_base 119: mod_base = OTHER; note = Phosphorothioate (PS) linkage
  modified_base 119: mod_base = cm
  modified_base 120: mod_base = OTHER; note = Phosphorothioate (PS) linkage
  modified_base 120: mod_base = OTHER; note = 2'-O-methyladenosine
  source 1..120: mol_type = other RNA

SEQ ID NO: 474 - RNA, 119 nt, synthetic construct; identical to SEQ ID NO: 385
  modified_base 1: mod_base = OTHER; note = 2'-O-methyladenosine
  modified_base 2: mod_base = OTHER; note = Phosphorothioate (PS) linkage
  modified_base 2: mod_base = cm
  modified_base 3: mod_base = OTHER; note = Phosphorothioate (PS) linkage
  modified_base 3: mod_base = um
  modified_base 4: mod_base = OTHER; note = Phosphorothioate (PS) linkage
  modified_base 29: mod_base = gm
  modified_base 30: mod_base = cm
  modified_base 31: mod_base = um
  modified_base 32: mod_base = OTHER; note = 2'-O-methyladenosine
  modified_base 33: mod_base = gm
  modified_base 34: mod_base = OTHER; note = 2'-O-methyladenosine
  modified_base 35: mod_base = OTHER; note = 2'-O-methyladenosine
  modified_base 36: mod_base = OTHER; note = 2'-O-methyladenosine
  modified_base 37: mod_base = um
  modified_base 38: mod_base = OTHER; note = 2'-O-methyladenosine
  modified_base 39: mod_base = gm
  modified_base 40: mod_base = cm
  modified_base 68: mod_base = OTHER; note = 2'-O-methyladenosine
  modified_base 69: mod_base = OTHER; note = 2'-O-methyladenosine
  modified_base 70: mod_base = cm
  modified_base 71: mod_base = um
  modified_base 72: mod_base = um
  modified_base 73: mod_base = gm
  modified_base 74: mod_base = OTHER; note = 2'-O-methyladenosine
  modified_base 75: mod_base = OTHER; note = 2'-O-methyladenosine
  modified_base 76: mod_base = OTHER; note = 2'-O-methyladenosine
  modified_base 77: mod_base = OTHER; note = 2'-O-methyladenosine
  modified_base 78: mod_base = OTHER; note = 2'-O-methyladenosine
  modified_base 79: mod_base = gm
  modified_base 80: mod_base = um
  modified_base 81: mod_base = gm
  modified_base 82: mod_base = gm
  modified_base 83: mod_base = cm
  modified_base 84: mod_base = OTHER; note = 2'-O-methyladenosine
  modified_base 85: mod_base = cm
  modified_base 86: mod_base = cm
  modified_base 87: mod_base = gm
  modified_base 88: mod_base = OTHER; note = 2'-O-methyladenosine
  modified_base 89: mod_base = gm
  modified_base 90: mod_base = um
  modified_base 91: mod_base = cm
  modified_base 92: mod_base = gm
  modified_base 93: mod_base = gm
  modified_base 94: mod_base = um
  modified_base 95: mod_base = gm
  modified_base 96: mod_base = cm
  modified_base 117: mod_base = OTHER; note = Phosphorothioate (PS) linkage
  modified_base 117: mod_base = OTHER; note = 2'-O-methyladenosine
  modified_base 118: mod_base = OTHER; note = Phosphorothioate (PS) linkage
  modified_base 118: mod_base = gm
  modified_base 119: mod_base = OTHER; note = Phosphorothioate (PS) linkage
  modified_base 119: mod_base = cm
  source 1..119: mol_type = other RNA

SEQ ID NO: 475 - RNA, 118 nt, synthetic construct; identical to SEQ ID NO: 386
  modified_base 1: mod_base = OTHER; note = 2'-O-methyladenosine
  modified_base 2: mod_base = OTHER; note = Phosphorothioate (PS) linkage
  modified_base 2: mod_base = cm
  modified_base 3: mod_base = OTHER; note = Phosphorothioate (PS) linkage
  modified_base 3: mod_base = um
  modified_base 4: mod_base = OTHER; note = Phosphorothioate (PS) linkage
  modified_base 29: mod_base = gm
  modified_base 30: mod_base = cm
  modified_base 31: mod_base = um
  modified_base 32: mod_base = OTHER; note = 2'-O-methyladenosine
  modified_base 33: mod_base = gm
  modified_base 34: mod_base = OTHER; note = 2'-O-methyladenosine
  modified_base 35: mod_base = OTHER; note = 2'-O-methyladenosine
  modified_base 36: mod_base = OTHER; note = 2'-O-methyladenosine
  modified_base 37: mod_base = um
  modified_base 38: mod_base = OTHER; note = 2'-O-methyladenosine
  modified_base 39: mod_base = gm
  modified_base 40: mod_base = cm
  modified_base 68: mod_base = OTHER; note = 2'-O-methyladenosine
  modified_base 69: mod_base = OTHER; note = 2'-O-methyladenosine
  modified_base 70: mod_base = cm
  modified_base 71: mod_base = um
  modified_base 72: mod_base = um
  modified_base 73: mod_base = gm
  modified_base 74: mod_base = OTHER; note = 2'-O-methyladenosine
  modified_base 75: mod_base = OTHER; note = 2'-O-methyladenosine
  modified_base 76: mod_base = OTHER; note = 2'-O-methyladenosine
  modified_base 77: mod_base = OTHER; note = 2'-O-methyladenosine
  modified_base 78: mod_base = OTHER; note = 2'-O-methyladenosine
  modified_base 79: mod_base = gm
  modified_base 80: mod_base = um
  modified_base 81: mod_base = gm
  modified_base 82: mod_base = gm
  modified_base 83: mod_base = cm
  modified_base 84: mod_base = OTHER; note = 2'-O-methyladenosine
  modified_base 85: mod_base = cm
  modified_base 86: mod_base = cm
  modified_base 87: mod_base = gm
  modified_base 88: mod_base = OTHER; note = 2'-O-methyladenosine
  modified_base 89: mod_base = gm
  modified_base 90: mod_base = um
  modified_base 91: mod_base = cm
  modified_base 92: mod_base = gm
  modified_base 93: mod_base = gm
  modified_base 94: mod_base = um
  modified_base 95: mod_base = gm
  modified_base 96: mod_base = cm
  modified_base 116: mod_base = OTHER; note = Phosphorothioate (PS) linkage
  modified_base 116: mod_base = cm
  modified_base 117: mod_base = OTHER; note = Phosphorothioate (PS) linkage
  modified_base 117: mod_base = OTHER; note = 2'-O-methyladenosine
  modified_base 118: mod_base = OTHER; note = Phosphorothioate (PS) linkage
  modified_base 118: mod_base = gm
  source 1..118: mol_type = other RNA

SEQ ID NO: 476 - RNA, 117 nt, synthetic construct; identical to SEQ ID NO: 387
  modified_base 1: mod_base = OTHER; note = 2'-O-methyladenosine
  modified_base 2: mod_base = OTHER; note = Phosphorothioate (PS) linkage
  modified_base 2: mod_base = cm
  modified_base 3: mod_base = OTHER; note = Phosphorothioate (PS) linkage
  modified_base 3: mod_base = um
  modified_base 4: mod_base = OTHER; note = Phosphorothioate (PS) linkage
  modified_base 29: mod_base = gm
  modified_base 30: mod_base = cm
  modified_base 31: mod_base = um
  modified_base 32: mod_base = OTHER; note = 2'-O-methyladenosine
  modified_base 33: mod_base = gm
  modified_base 34: mod_base = OTHER; note = 2'-O-methyladenosine
  modified_base 35: mod_base = OTHER; note = 2'-O-methyladenosine
  modified_base 36: mod_base = OTHER; note = 2'-O-methyladenosine
  modified_base 37: mod_base = um
  modified_base 38: mod_base = OTHER; note = 2'-O-methyladenosine
  modified_base 39: mod_base = gm
  modified_base 40: mod_base = cm
  modified_base 68: mod_base = OTHER; note = 2'-O-methyladenosine
  modified_base 69: mod_base = OTHER; note = 2'-O-methyladenosine
  modified_base 70: mod_base = cm
  modified_base 71: mod_base = um
  modified_base 72: mod_base = um
  modified_base 73: mod_base = gm
  modified_base 74: mod_base = OTHER; note = 2'-O-methyladenosine
  modified_base 75: mod_base = OTHER; note = 2'-O-methyladenosine
  modified_base 76: mod_base = OTHER; note = 2'-O-methyladenosine
  modified_base 77: mod_base = OTHER; note = 2'-O-methyladenosine
  modified_base 78: mod_base = OTHER; note = 2'-O-methyladenosine
  modified_base 79: mod_base = gm
  modified_base 80: mod_base = um
  modified_base 81: mod_base = gm
  modified_base 82: mod_base = gm
  modified_base 83: mod_base = cm
  modified_base 84: mod_base = OTHER; note = 2'-O-methyladenosine
  modified_base 85: mod_base = cm
  modified_base 86: mod_base = cm
  modified_base 87: mod_base = gm
  modified_base 88: mod_base = OTHER; note = 2'-O-methyladenosine
  modified_base 89: mod_base = gm
  modified_base 90: mod_base = um
  modified_base 91: mod_base = cm
  modified_base 92: mod_base = gm
  modified_base 93: mod_base = gm
  modified_base 94: mod_base = um
  modified_base 95: mod_base = gm
  modified_base 96: mod_base = cm
  modified_base 115: mod_base = OTHER; note = Phosphorothioate (PS) linkage
  modified_base 115: mod_base = gm
  modified_base 116: mod_base = OTHER; note = Phosphorothioate (PS) linkage
  modified_base 116: mod_base = cm
  modified_base 117: mod_base = OTHER; note = Phosphorothioate (PS) linkage
  modified_base 117: mod_base = OTHER; note = 2'-O-methyladenosine
  source 1..117: mol_type = other RNA

SEQ ID NO: 477 - RNA, 116 nt, synthetic construct; identical to SEQ ID NO: 388
  modified_base 1: mod_base = OTHER; note = 2'-O-methyladenosine
  modified_base 2: mod_base = OTHER; note = Phosphorothioate (PS) linkage
  modified_base 2: mod_base = cm
  modified_base 3: mod_base = OTHER; note = Phosphorothioate (PS) linkage
  modified_base 3: mod_base = um
  modified_base 4: mod_base = OTHER; note = Phosphorothioate (PS) linkage
  modified_base 29: mod_base = gm
  modified_base 30: mod_base = cm
  modified_base 31: mod_base = um
  modified_base 32: mod_base = OTHER; note = 2'-O-methyladenosine
  modified_base 33: mod_base = gm
  modified_base 34: mod_base = OTHER; note = 2'-O-methyladenosine
  modified_base 35: mod_base = OTHER; note = 2'-O-methyladenosine
  modified_base 36: mod_base = OTHER; note = 2'-O-methyladenosine
  modified_base 37: mod_base = um
  modified_base 38: mod_base = OTHER; note = 2'-O-methyladenosine
  modified_base 39: mod_base = gm
  modified_base 40: mod_base = cm
  modified_base 68: mod_base = OTHER; note = 2'-O-methyladenosine
  modified_base 69: mod_base = OTHER; note = 2'-O-methyladenosine
  modified_base 70: mod_base = cm
  modified_base 71: mod_base = um
  modified_base 72: mod_base = um
  modified_base 73: mod_base = gm
  modified_base 74: mod_base = OTHER; note = 2'-O-methyladenosine
  modified_base 75: mod_base = OTHER; note = 2'-O-methyladenosine
  modified_base 76: mod_base = OTHER; note = 2'-O-methyladenosine
  modified_base 77: mod_base = OTHER; note = 2'-O-methyladenosine
  modified_base 78: mod_base = OTHER; note = 2'-O-methyladenosine
  modified_base 79: mod_base = gm
  modified_base 80: mod_base = um
  modified_base 81: mod_base = gm
  modified_base 82: mod_base = gm
  modified_base 83: mod_base = cm
  modified_base 84: mod_base = OTHER; note = 2'-O-methyladenosine
  modified_base 85: mod_base = cm
  modified_base 86: mod_base = cm
  modified_base 87: mod_base = gm
  modified_base 88: mod_base = OTHER; note = 2'-O-methyladenosine
  modified_base 89: mod_base = gm
  modified_base 90: mod_base = um
  modified_base 91: mod_base = cm
  modified_base 92: mod_base = gm
  modified_base 93: mod_base = gm
  modified_base 94: mod_base = um
  modified_base 95: mod_base = gm
  modified_base 96: mod_base = cm
  modified_base 114: mod_base = OTHER; note = Phosphorothioate (PS) linkage
  modified_base 114: mod_base = gm
  modified_base 115: mod_base = OTHER; note = Phosphorothioate (PS) linkage
  modified_base 115: mod_base = gm
  modified_base 116: mod_base = OTHER; note = Phosphorothioate (PS) linkage
  modified_base 116: mod_base = cm
  source 1..116: mol_type = other RNA

SEQ ID NO: 478 - RNA, 115 nt, synthetic construct; identical to SEQ ID NO: 389
  modified_base 1: mod_base = OTHER; note = 2'-O-methyladenosine
  modified_base 2: mod_base = OTHER; note = Phosphorothioate (PS) linkage
  modified_base 2: mod_base = cm
  modified_base 3: mod_base = OTHER; note = Phosphorothioate (PS) linkage
  modified_base 3: mod_base = um
  modified_base 4: mod_base = OTHER; note = Phosphorothioate (PS) linkage
  modified_base 29: mod_base = gm
  modified_base 30: mod_base = cm
  modified_base 31: mod_base = um
  modified_base 32: mod_base = OTHER; note = 2'-O-methyladenosine
  modified_base 33: mod_base = gm
  modified_base 34: mod_base = OTHER; note = 2'-O-methyladenosine
  modified_base 35: mod_base = OTHER; note = 2'-O-methyladenosine
  modified_base 36: mod_base = OTHER; note = 2'-O-methyladenosine
  modified_base 37: mod_base = um
  modified_base 38: mod_base = OTHER; note = 2'-O-methyladenosine
  modified_base 39: mod_base = gm
  modified_base 40: mod_base = cm
  modified_base 68: mod_base = OTHER; note = 2'-O-methyladenosine
  modified_base 69: mod_base = OTHER; note = 2'-O-methyladenosine
  modified_base 70: mod_base = cm
  modified_base 71: mod_base = um
  modified_base 72: mod_base = um
  modified_base 73: mod_base = gm
  modified_base 74: mod_base = OTHER; note = 2'-O-methyladenosine
  modified_base 75: mod_base = OTHER; note = 2'-O-methyladenosine
  modified_base 76: mod_base = OTHER; note = 2'-O-methyladenosine
  modified_base 77: mod_base = OTHER; note = 2'-O-methyladenosine
  modified_base 78: mod_base = OTHER; note = 2'-O-methyladenosine
  modified_base 79: mod_base = gm
  modified_base 80: mod_base = um
  modified_base 81: mod_base = gm
  modified_base 82: mod_base = gm
  modified_base 83: mod_base = cm
  modified_base 84: mod_base = OTHER; note = 2'-O-methyladenosine
  modified_base 85: mod_base = cm
  modified_base 86: mod_base = cm
  modified_base 87: mod_base = gm
  modified_base 88: mod_base = OTHER; note = 2'-O-methyladenosine
  modified_base 89: mod_base = gm
  modified_base 90: mod_base = um
  modified_base 91: mod_base = cm
  modified_base 92: mod_base = gm
  modified_base 93: mod_base = gm
  modified_base 94: mod_base = um
  modified_base 95: mod_base = gm
  modified_base 96: mod_base = cm
  modified_base 113: mod_base = OTHER; note = Phosphorothioate (PS) linkage
  modified_base 113: mod_base = um
  modified_base 114: mod_base = OTHER; note = Phosphorothioate (PS) linkage
  modified_base 114: mod_base = gm
  modified_base 115: mod_base = OTHER; note = Phosphorothioate (PS) linkage
  modified_base 115: mod_base = gm
  source 1..115: mol_type = other RNA

SEQ ID NO: 479 - RNA, 114 nt, synthetic construct; identical to SEQ ID NO: 390
  modified_base 1: mod_base = OTHER; note = 2'-O-methyladenosine
  modified_base 2: mod_base = OTHER; note = Phosphorothioate (PS) linkage
  modified_base 2: mod_base = cm
  modified_base 3: mod_base = OTHER; note = Phosphorothioate (PS) linkage
  modified_base 3: mod_base = um
  modified_base 4: mod_base = OTHER; note = Phosphorothioate (PS) linkage
  modified_base 29: mod_base = gm
  modified_base 30: mod_base = cm
  modified_base 31: mod_base = um
  modified_base 32: mod_base = OTHER; note = 2'-O-methyladenosine
  modified_base 33: mod_base = gm
  modified_base 34: mod_base = OTHER; note = 2'-O-methyladenosine
  modified_base 35: mod_base = OTHER; note = 2'-O-methyladenosine
  modified_base 36: mod_base = OTHER; note = 2'-O-methyladenosine
  modified_base 37: mod_base = um
  modified_base 38: mod_base = OTHER; note = 2'-O-methyladenosine
  modified_base 39: mod_base = gm
  modified_base 40: mod_base = cm
  modified_base 68: mod_base = OTHER; note = 2'-O-methyladenosine
  modified_base 69: mod_base = OTHER; note = 2'-O-methyladenosine
  modified_base 70: mod_base = cm
  modified_base 71: mod_base = um
  modified_base 72: mod_base = um
  modified_base 73: mod_base = gm
  modified_base 74: mod_base = OTHER; note = 2'-O-methyladenosine
  modified_base 75: mod_base = OTHER; note = 2'-O-methyladenosine
  modified_base 76: mod_base = OTHER; note = 2'-O-methyladenosine
  modified_base 77: mod_base = OTHER; note = 2'-O-methyladenosine
  modified_base 78: mod_base = OTHER; note = 2'-O-methyladenosine
  modified_base 79: mod_base = gm
  modified_base 80: mod_base = um
  modified_base 81: mod_base = gm
  modified_base 82: mod_base = gm
  modified_base 83: mod_base = cm
  modified_base 84: mod_base = OTHER; note = 2'-O-methyladenosine
  modified_base 85: mod_base = cm
  modified_base 86: mod_base = cm
  modified_base 87: mod_base = gm
  modified_base 88: mod_base = OTHER; note = 2'-O-methyladenosine
  modified_base 89: mod_base = gm
  modified_base 90: mod_base = um
  modified_base 91: mod_base = cm
  modified_base 92: mod_base = gm
  modified_base 93: mod_base = gm
  modified_base 94: mod_base = um
  modified_base 95: mod_base = gm
  modified_base 96: mod_base = cm
  modified_base 112: mod_base = OTHER; note = Phosphorothioate (PS) linkage
  modified_base 112: mod_base = gm
  modified_base 113: mod_base = OTHER; note = Phosphorothioate (PS) linkage
  modified_base 113: mod_base = um
  modified_base 114: mod_base = OTHER; note = Phosphorothioate (PS) linkage
  modified_base 114: mod_base = gm
  source 1..114: mol_type = other RNA

SEQ ID NO: 480 - RNA, 124 nt, synthetic construct; identical to SEQ ID NO: 391
  modified_base 1: mod_base = OTHER; note = 2'-O-methyladenosine
  modified_base 2: mod_base = OTHER; note = Phosphorothioate (PS) linkage
  modified_base 2: mod_base = cm
  modified_base 3: mod_base = OTHER; note = Phosphorothioate (PS) linkage
  modified_base 3: mod_base = um
  modified_base 4: mod_base = OTHER; note = Phosphorothioate (PS) linkage
  modified_base 29: mod_base = gm
  modified_base 30: mod_base = cm
  modified_base 31: mod_base = um
  modified_base 32: mod_base = OTHER; note = 2'-O-methyladenosine
  modified_base 33: mod_base = gm
  modified_base 34: mod_base = OTHER; note = 2'-O-methyladenosine
  modified_base 35: mod_base = OTHER; note = 2'-O-methyladenosine
  modified_base 36: mod_base = OTHER; note = 2'-O-methyladenosine
  modified_base 37: mod_base = um
  modified_base 38: mod_base = OTHER; note = 2'-O-methyladenosine
  modified_base 39: mod_base = gm
  modified_base 40: mod_base = cm
  modified_base 68: mod_base = OTHER; note = 2'-O-methyladenosine
  modified_base 69: mod_base = OTHER; note = 2'-O-methyladenosine
  modified_base 70: mod_base = cm
  modified_base 71: mod_base = um
  modified_base 72: mod_base = um
  modified_base 73: mod_base = gm
  modified_base 74: mod_base = OTHER; note = 2'-O-methyladenosine
  modified_base 75: mod_base = OTHER; note = 2'-O-methyladenosine
  modified_base 76: mod_base = OTHER; note = 2'-O-methyladenosine
  modified_base 77: mod_base = OTHER; note = 2'-O-methyladenosine
  modified_base 78: mod_base = OTHER; note = 2'-O-methyladenosine
  modified_base 79: mod_base = gm
  modified_base 80: mod_base = um
  modified_base 81: mod_base = gm
  modified_base 82: mod_base = gm
  modified_base 83: mod_base = cm
  modified_base 84: mod_base = OTHER; note = 2'-O-methyladenosine
  modified_base 85: mod_base = cm
  modified_base 86: mod_base = cm
  modified_base 87: mod_base = gm
  modified_base 88: mod_base = OTHER; note = 2'-O-methyladenosine
  modified_base 89: mod_base = gm
  modified_base 90: mod_base = um
  modified_base 91: mod_base = cm
  modified_base 92: mod_base = gm
  modified_base 93: mod_base = gm
  modified_base 94: mod_base = um
  modified_base 95: mod_base = gm
  modified_base 96: mod_base = cm
  modified_base 122: mod_base = OTHER; note = Phosphorothioate (PS) linkage
  modified_base 122: mod_base = OTHER; note = 2'-O-methyladenosine
  modified_base 123: mod_base = OTHER; note = Phosphorothioate (PS) linkage
  modified_base 123: mod_base = OTHER; note = 2'-O-methyladenosine
  modified_base 124: mod_base = OTHER; note = Phosphorothioate (PS) linkage
  modified_base 124: mod_base = OTHER; note = 2'-O-methyladenosine
  source 1..124: mol_type = other RNA

SEQ ID NO: 481 - RNA, 123 nt, synthetic construct; identical to SEQ ID NO: 392
  modified_base 1: mod_base = OTHER; note = 2'-O-methyladenosine
  modified_base 2: mod_base = OTHER; note = Phosphorothioate (PS) linkage
  modified_base 2: mod_base = cm
  modified_base 3: mod_base = OTHER; note = Phosphorothioate (PS) linkage
  modified_base 3: mod_base = um
  modified_base 4: mod_base = OTHER; note = Phosphorothioate (PS) linkage
  modified_base 29: mod_base = gm
  modified_base 30: mod_base = cm
  modified_base 31: mod_base = um
  modified_base 32: mod_base = OTHER; note = 2'-O-methyladenosine
  modified_base 33: mod_base = gm
  modified_base 34: mod_base = OTHER; note = 2'-O-methyladenosine
  modified_base 35: mod_base = OTHER; note = 2'-O-methyladenosine
  modified_base 36: mod_base = OTHER; note = 2'-O-methyladenosine
  modified_base 37: mod_base = um
  modified_base 38: mod_base = OTHER; note = 2'-O-methyladenosine
  modified_base 39: mod_base = gm
  modified_base 40: mod_base = cm
  modified_base 68: mod_base = OTHER; note = 2'-O-methyladenosine
  modified_base 69: mod_base = OTHER; note = 2'-O-methyladenosine
  modified_base 70: mod_base = cm
  modified_base 71: mod_base = um
  modified_base 72: mod_base = um
  modified_base 73: mod_base = gm
  modified_base 74: mod_base = OTHER; note = 2'-O-methyladenosine
  modified_base 75: mod_base = OTHER; note = 2'-O-methyladenosine
  modified_base 76: mod_base = OTHER; note = 2'-O-methyladenosine
  modified_base 77: mod_base = OTHER; note = 2'-O-methyladenosine
  modified_base 78: mod_base = OTHER; note = 2'-O-methyladenosine
  modified_base 79: mod_base = gm
  modified_base 80: mod_base = um
  modified_base 81: mod_base = gm
  modified_base 82: mod_base = gm
  modified_base 83: mod_base = cm
  modified_base 84: mod_base = OTHER; note = 2'-O-methyladenosine
  modified_base 85: mod_base = cm
  modified_base 86: mod_base = cm
  modified_base 87: mod_base = gm
  modified_base 88: mod_base = OTHER; note = 2'-O-methyladenosine
  modified_base 89: mod_base = gm
  modified_base 90: mod_base = um
  modified_base 91: mod_base = cm
  modified_base 92: mod_base = gm
  modified_base 93: mod_base = gm
  modified_base 94: mod_base = um
  modified_base 95: mod_base = gm
  modified_base 96: mod_base = cm
  modified_base 121: mod_base = OTHER; note = Phosphorothioate (PS) linkage
  modified_base 121: mod_base = cm
  modified_base 122: mod_base = OTHER; note = Phosphorothioate (PS) linkage
  modified_base 122: mod_base = OTHER; note = 2'-O-methyladenosine
  modified_base 123: mod_base = OTHER; note = Phosphorothioate (PS) linkage
  modified_base 123: mod_base = OTHER; note = 2'-O-methyladenosine
  source 1..123: mol_type = other RNA

SEQ ID NO: 482 - RNA, 122 nt, synthetic construct; identical to SEQ ID NO: 393
  modified_base 1: mod_base = OTHER; note = 2'-O-methyladenosine
  modified_base 2: mod_base = OTHER; note = Phosphorothioate (PS) linkage
  modified_base 2: mod_base = cm
  modified_base 3: mod_base = OTHER; note = Phosphorothioate (PS) linkage
  modified_base 3: mod_base = um
  modified_base 4: mod_base = OTHER; note = Phosphorothioate (PS) linkage
  modified_base 29: mod_base = gm
  modified_base 30: mod_base = cm
  modified_base 31: mod_base = um
  modified_base 32: mod_base = OTHER; note = 2'-O-methyladenosine
  modified_base 33: mod_base = gm
  modified_base 34: mod_base = OTHER; note = 2'-O-methyladenosine
  modified_base 35: mod_base = OTHER; note = 2'-O-methyladenosine
  modified_base 36: mod_base = OTHER; note = 2'-O-methyladenosine
  modified_base 37: mod_base = um
  modified_base 38: mod_base = OTHER; note = 2'-O-methyladenosine
  modified_base 39: mod_base = gm
  modified_base 40: mod_base = cm
  modified_base 68: mod_base = OTHER; note = 2'-O-methyladenosine
  modified_base 69: mod_base = OTHER; note = 2'-O-methyladenosine
  modified_base 70: mod_base = cm
  modified_base 71: mod_base = um
  modified_base 72: mod_base = um
  modified_base 73: mod_base = gm
  modified_base 74: mod_base = OTHER; note = 2'-O-methyladenosine
  modified_base 75: mod_base = OTHER; note = 2'-O-methyladenosine
  modified_base 76: mod_base = OTHER; note = 2'-O-methyladenosine
  modified_base 77: mod_base = OTHER; note = 2'-O-methyladenosine
  modified_base 78: mod_base = OTHER; note = 2'-O-methyladenosine
  modified_base 79: mod_base = gm
  modified_base 80: mod_base = um
  modified_base 81: mod_base = gm
  modified_base 82: mod_base = gm
  modified_base 83: mod_base = cm
  modified_base 84: mod_base = OTHER; note = 2'-O-methyladenosine
  modified_base 85: mod_base = cm
  modified_base 86: mod_base = cm
  modified_base 87: mod_base = gm
  modified_base 88: mod_base = OTHER; note = 2'-O-methyladenosine
  modified_base 89: mod_base = gm
  modified_base 90: mod_base = um
  modified_base 91: mod_base = cm
  modified_base 92: mod_base = gm
  modified_base 93: mod_base = gm
  modified_base 94: mod_base = um
  modified_base 95: mod_base = gm
  modified_base 96: mod_base = cm
  modified_base 120: mod_base = OTHER; note = Phosphorothioate (PS) linkage
  modified_base 120: mod_base = gm
  modified_base 121: mod_base = OTHER; note = Phosphorothioate (PS) linkage
  modified_base 121: mod_base = cm
  modified_base 122: mod_base = OTHER; note = Phosphorothioate (PS) linkage
  modified_base 122: mod_base = OTHER; note = 2'-O-methyladenosine
  source 1..122: mol_type = other RNA

SEQ ID NO: 483 - RNA, 121 nt, synthetic construct; identical to SEQ ID NO: 394
  modified_base 1: mod_base = OTHER; note = 2'-O-methyladenosine
  modified_base 2: mod_base = OTHER; note = Phosphorothioate (PS) linkage
  modified_base 2: mod_base = cm
  modified_base 3: mod_base = OTHER; note = Phosphorothioate (PS) linkage
  modified_base 3: mod_base = um
  modified_base 4: mod_base = OTHER; note = Phosphorothioate (PS) linkage
  modified_base 29: mod_base = gm
  modified_base 30: mod_base = cm
  modified_base 31: mod_base = um
  modified_base 32: mod_base = OTHER; note = 2'-O-methyladenosine
  modified_base 33: mod_base = gm
  modified_base 34: mod_base = OTHER; note = 2'-O-methyladenosine
  modified_base 35: mod_base = OTHER; note = 2'-O-methyladenosine
  modified_base 36: mod_base = OTHER; note = 2'-O-methyladenosine
  modified_base 37: mod_base = um
  modified_base 38: mod_base = OTHER; note = 2'-O-methyladenosine
  modified_base 39: mod_base = gm
  modified_base 40: mod_base = cm
  modified_base 68: mod_base = OTHER; note = 2'-O-methyladenosine
  modified_base 69: mod_base = OTHER; note = 2'-O-methyladenosine
  modified_base 70: mod_base = cm
  modified_base 71: mod_base = um
  modified_base 72: mod_base = um
  modified_base 73: mod_base = gm
  modified_base 74: mod_base = OTHER; note = 2'-O-methyladenosine
  modified_base 75: mod_base = OTHER; note = 2'-O-methyladenosine
  modified_base 76: mod_base = OTHER; note = 2'-O-methyladenosine
  modified_base 77: mod_base = OTHER; note = 2'-O-methyladenosine
  modified_base 78: mod_base = OTHER; note = 2'-O-methyladenosine
  modified_base 79: mod_base = gm
  modified_base 80: mod_base = um
  modified_base 81: mod_base = gm
  modified_base 82: mod_base = gm
  modified_base 83: mod_base = cm
  modified_base 84: mod_base = OTHER; note = 2'-O-methyladenosine
  modified_base 85: mod_base = cm
  modified_base 86: mod_base = cm
  modified_base 87: mod_base = gm
  modified_base 88: mod_base = OTHER; note = 2'-O-methyladenosine
  modified_base 89: mod_base = gm
  modified_base 90: mod_base = um
  modified_base 91: mod_base = cm
  modified_base 92: mod_base = gm
  modified_base 93: mod_base = gm
  modified_base 94: mod_base = um
  modified_base 95: mod_base = gm
  modified_base 96: mod_base = cm
  modified_base 119: mod_base = OTHER; note = Phosphorothioate (PS) linkage
  modified_base 119: mod_base = OTHER; note = 2'-O-methyladenosine
  modified_base 120: mod_base = OTHER; note = Phosphorothioate (PS) linkage
  modified_base 120: mod_base = gm
  modified_base 121: mod_base = OTHER; note = Phosphorothioate (PS) linkage
  modified_base 121: mod_base = cm
  source 1..121: mol_type = other RNA

SEQ ID NO: 484 - RNA, 120 nt, synthetic construct; identical to SEQ ID NO: 395
  modified_base 1: mod_base = OTHER; note = 2'-O-methyladenosine
  modified_base 2: mod_base = OTHER; note = Phosphorothioate (PS) linkage
  modified_base 2: mod_base = cm
  modified_base 3: mod_base = OTHER; note = Phosphorothioate (PS) linkage
  modified_base 3: mod_base = um
  modified_base 4: mod_base = OTHER; note = Phosphorothioate (PS) linkage
  modified_base 29: mod_base = gm
  modified_base 30: mod_base = cm
  modified_base 31: mod_base = um
  modified_base 32: mod_base = OTHER; note = 2'-O-methyladenosine
  modified_base 33: mod_base = gm
  modified_base 34: mod_base = OTHER; note = 2'-O-methyladenosine
  modified_base 35: mod_base = OTHER; note = 2'-O-methyladenosine
  modified_base 36: mod_base = OTHER; note = 2'-O-methyladenosine
  modified_base 37: mod_base = um
  modified_base 38: mod_base = OTHER; note = 2'-O-methyladenosine
  modified_base 39: mod_base = gm
  modified_base 40: mod_base = cm
  modified_base 68: mod_base = OTHER; note = 2'-O-methyladenosine
  modified_base 69: mod_base = OTHER; note = 2'-O-methyladenosine
  modified_base 70: mod_base = cm
  modified_base 71: mod_base = um
  modified_base 72: mod_base = um
  modified_base 73: mod_base = gm
  modified_base 74: mod_base = OTHER; note = 2'-O-methyladenosine
  modified_base 75: mod_base = OTHER; note = 2'-O-methyladenosine
  modified_base 76: mod_base = OTHER; note = 2'-O-methyladenosine
  modified_base 77: mod_base = OTHER; note = 2'-O-methyladenosine
  modified_base 78: mod_base = OTHER; note = 2'-O-methyladenosine
  modified_base 79: mod_base = gm
  modified_base 80: mod_base = um
  modified_base 81: mod_base = gm
  modified_base 82: mod_base = gm
  modified_base 83: mod_base = cm
  modified_base 84: mod_base = OTHER; note = 2'-O-methyladenosine
  modified_base 85: mod_base = cm
  modified_base 86: mod_base = cm
  modified_base 87: mod_base = gm
  modified_base 88: mod_base = OTHER; note = 2'-O-methyladenosine
  modified_base 89: mod_base = gm
  modified_base 90: mod_base = um
  modified_base 91: mod_base = cm
  modified_base 92: mod_base = gm
  modified_base 93: mod_base = gm
  modified_base 94: mod_base = um
  modified_base 95: mod_base = gm
  modified_base 96: mod_base = cm
  modified_base 118: mod_base = OTHER; note = Phosphorothioate (PS) linkage
  modified_base 118: mod_base = cm
  modified_base 119: mod_base = OTHER; note = Phosphorothioate (PS) linkage
  modified_base 119: mod_base = OTHER; note = 2'-O-methyladenosine
  modified_base 120: mod_base = OTHER; note = Phosphorothioate (PS) linkage
  modified_base 120: mod_base = gm
  source 1..120: mol_type = other RNA

SEQ ID NO: 485 - RNA, 119 nt, synthetic construct; identical to SEQ ID NO: 396
  modified_base 1: mod_base = OTHER; note = 2'-O-methyladenosine
  modified_base 2: mod_base = OTHER; note = Phosphorothioate (PS) linkage
  modified_base 2: mod_base = cm
  modified_base 3: mod_base = OTHER; note = Phosphorothioate (PS) linkage
  modified_base 3: mod_base = um
  modified_base 4: mod_base = OTHER; note = Phosphorothioate (PS) linkage
  modified_base 29: mod_base = gm
  modified_base 30: mod_base = cm
  modified_base 31: mod_base = um
  modified_base 32: mod_base = OTHER; note = 2'-O-methyladenosine
  modified_base 33: mod_base = gm
  modified_base 34: mod_base = OTHER; note = 2'-O-methyladenosine
  modified_base 35: mod_base = OTHER; note = 2'-O-methyladenosine
  modified_base 36: mod_base = OTHER; note = 2'-O-methyladenosine
  modified_base 37: mod_base = um
  modified_base 38: mod_base = OTHER; note = 2'-O-methyladenosine
  modified_base 39: mod_base = gm
  modified_base 40: mod_base = cm
  modified_base 68: mod_base = OTHER; note = 2'-O-methyladenosine
  modified_base 69: mod_base = OTHER; note = 2'-O-methyladenosine
  modified_base 70: mod_base = cm
  modified_base 71: mod_base = um
  modified_base 72: mod_base = um
  modified_base 73: mod_base = gm
  modified_base 74: mod_base = OTHER; note = 2'-O-methyladenosine
  modified_base 75: mod_base = OTHER; note = 2'-O-methyladenosine
  modified_base 76: mod_base = OTHER; note = 2'-O-methyladenosine
  modified_base 77: mod_base = OTHER; note = 2'-O-methyladenosine
  modified_base 78: mod_base = OTHER; note = 2'-O-methyladenosine
  modified_base 79: mod_base = gm
  modified_base 80: mod_base = um
  modified_base 81: mod_base = gm
  modified_base 82: mod_base = gm
  modified_base 83: mod_base = cm
  modified_base 84: mod_base = OTHER; note = 2'-O-methyladenosine
  modified_base 85: mod_base = cm
  modified_base 86: mod_base = cm
  modified_base 87: mod_base = gm
  modified_base 88: mod_base = OTHER; note = 2'-O-methyladenosine
  modified_base 89: mod_base = gm
  modified_base 90: mod_base = um
  modified_base 91: mod_base = cm
  modified_base 92: mod_base = gm
  modified_base 93: mod_base = gm
  modified_base 94: mod_base = um
  modified_base 95: mod_base = gm
  modified_base 96: mod_base = cm
  modified_base 117: mod_base = OTHER; note = Phosphorothioate (PS) linkage
  modified_base 117: mod_base = gm
  modified_base 118: mod_base = OTHER; note = Phosphorothioate (PS) linkage
  modified_base 118: mod_base = cm
  modified_base 119: mod_base = OTHER; note = Phosphorothioate (PS) linkage
  modified_base 119: mod_base = OTHER; note = 2'-O-methyladenosine
  source 1..119: mol_type = other RNA

SEQ ID NO: 486 - RNA, 118 nt, synthetic construct; identical to SEQ ID NO: 397
  modified_base 1: mod_base = OTHER; note = 2'-O-methyladenosine
  modified_base 2: mod_base = OTHER; note = Phosphorothioate (PS) linkage
  modified_base 2: mod_base = cm
  modified_base 3: mod_base = OTHER; note = Phosphorothioate (PS) linkage
  modified_base 3: mod_base = um
  modified_base 4: mod_base = OTHER; note = Phosphorothioate (PS) linkage
  modified_base 29: mod_base = gm
  modified_base 30: mod_base = cm
  modified_base 31: mod_base = um
  modified_base 32: mod_base = OTHER; note = 2'-O-methyladenosine
  modified_base 33: mod_base = gm
  modified_base 34: mod_base = OTHER; note = 2'-O-methyladenosine
  modified_base 35: mod_base = OTHER; note = 2'-O-methyladenosine
  modified_base 36: mod_base = OTHER; note = 2'-O-methyladenosine
  modified_base 37: mod_base = um
  modified_base 38: mod_base = OTHER; note = 2'-O-methyladenosine
  modified_base 39: mod_base = gm
  modified_base 40: mod_base = cm
  modified_base 68: mod_base = OTHER; note = 2'-O-methyladenosine
  modified_base 69: mod_base = OTHER; note = 2'-O-methyladenosine
  modified_base 70: mod_base = cm
  modified_base 71: mod_base = um
  modified_base 72: mod_base = um
  modified_base 73: mod_base = gm
  modified_base 74: mod_base = OTHER; note = 2'-O-methyladenosine
  modified_base 75: mod_base = OTHER; note = 2'-O-methyladenosine
  modified_base 76: mod_base = OTHER; note = 2'-O-methyladenosine
  modified_base 77: mod_base = OTHER; note = 2'-O-methyladenosine
  modified_base 78: mod_base = OTHER; note = 2'-O-methyladenosine
  modified_base 79: mod_base = gm
  modified_base 80: mod_base = um
  modified_base 81: mod_base = gm
  modified_base 82: mod_base = gm
  modified_base 83: mod_base = cm
  modified_base 84: mod_base = OTHER; note = 2'-O-methyladenosine
  modified_base 85: mod_base = cm
  modified_base 86: mod_base = cm
  modified_base 87: mod_base = gm
  modified_base 88: mod_base = OTHER; note = 2'-O-methyladenosine
  modified_base 89: mod_base = gm
  modified_base 90: mod_base = um
  modified_base 91: mod_base = cm
  modified_base 92: mod_base = gm
  modified_base 93: mod_base = gm
  modified_base 94: mod_base = um
  modified_base 95: mod_base = gm
  modified_base 96: mod_base = cm
  modified_base 116: mod_base = OTHER; note = Phosphorothioate (PS) linkage
  modified_base 116: mod_base = gm
  modified_base 117: mod_base = OTHER; note = Phosphorothioate (PS) linkage
  modified_base 117: mod_base = gm
  modified_base 118: mod_base = OTHER; note = Phosphorothioate (PS) linkage
  modified_base 118: mod_base = cm
  source 1..118: mol_type = other RNA

SEQ ID NO: 487 - RNA, 117 nt, synthetic construct; identical to SEQ ID NO: 398
  modified_base 1: mod_base = OTHER; note = 2'-O-methyladenosine
  modified_base 2: mod_base = OTHER; note = Phosphorothioate (PS) linkage
  modified_base 2: mod_base = cm
  modified_base 3: mod_base = OTHER; note = Phosphorothioate (PS) linkage
  modified_base 3: mod_base = um
  modified_base 4: mod_base = OTHER; note = Phosphorothioate (PS) linkage
  modified_base 29: mod_base = gm
  modified_base 30: mod_base = cm
  modified_base 31: mod_base = um
  modified_base 32: mod_base = OTHER; note = 2'-O-methyladenosine
  modified_base 33: mod_base = gm
  modified_base 34: mod_base = OTHER; note = 2'-O-methyladenosine
  modified_base 35: mod_base = OTHER; note = 2'-O-methyladenosine
  modified_base 36: mod_base = OTHER; note = 2'-O-methyladenosine
  modified_base 37: mod_base = um
  modified_base 38: mod_base = OTHER; note = 2'-O-methyladenosine
  modified_base 39: mod_base = gm
  modified_base 40: mod_base = cm
  modified_base 68: mod_base = OTHER; note = 2'-O-methyladenosine
  modified_base 69: mod_base = OTHER; note = 2'-O-methyladenosine
  modified_base 70: mod_base = cm
  modified_base 71: mod_base = um
  modified_base 72: mod_base = um
  modified_base 73: mod_base = gm
  modified_base 74: mod_base = OTHER; note = 2'-O-methyladenosine
  modified_base 75: mod_base = OTHER; note = 2'-O-methyladenosine
  modified_base 76: mod_base = OTHER; note = 2'-O-methyladenosine
  modified_base 77: mod_base = OTHER; note = 2'-O-methyladenosine
  modified_base 78: mod_base = OTHER; note = 2'-O-methyladenosine
  modified_base 79: mod_base = gm
  modified_base 80: mod_base = um
  modified_base 81: mod_base = gm
  modified_base 82: mod_base = gm
  modified_base 83: mod_base = cm
  modified_base 84: mod_base = OTHER; note = 2'-O-methyladenosine
  modified_base 85: mod_base = cm
  modified_base 86: mod_base = cm
  modified_base 87: mod_base = gm
  modified_base 88: mod_base = OTHER; note = 2'-O-methyladenosine
  modified_base 89: mod_base = gm
  modified_base 90: mod_base = um
  modified_base 91: mod_base = cm
  modified_base 92: mod_base = gm
  modified_base 93: mod_base = gm
  modified_base 94: mod_base = um
  modified_base 95: mod_base = gm
  modified_base 96: mod_base = cm
  modified_base 115: mod_base = OTHER; note = Phosphorothioate (PS) linkage
  modified_base 115: mod_base = um
  modified_base 116: mod_base = OTHER; note = Phosphorothioate (PS) linkage
  modified_base 116: mod_base = gm
  modified_base 117: mod_base = OTHER; note = Phosphorothioate (PS) linkage
  modified_base 117: mod_base = gm
  source 1..117: mol_type = other RNA

SEQ ID NO: 488 - RNA, 116 nt, synthetic construct; identical to SEQ ID NO: 399
  modified_base 1: mod_base = OTHER; note = 2'-O-methyladenosine
  modified_base 2: mod_base = OTHER; note = Phosphorothioate (PS) linkage
  modified_base 2: mod_base = cm
  modified_base 3: mod_base = OTHER; note = Phosphorothioate (PS) linkage
  modified_base 3: mod_base = um
  modified_base 4: mod_base = OTHER; note = Phosphorothioate (PS) linkage
  modified_base 29: mod_base = gm
  modified_base 30: mod_base = cm
  modified_base 31: mod_base = um
  modified_base 32: mod_base = OTHER; note = 2'-O-methyladenosine
  modified_base 33: mod_base = gm
  modified_base 34: mod_base = OTHER; note = 2'-O-methyladenosine
  modified_base 35: mod_base = OTHER; note = 2'-O-methyladenosine
  modified_base 36: mod_base = OTHER; note = 2'-O-methyladenosine
  modified_base 37: mod_base = um
  modified_base 38: mod_base = OTHER; note = 2'-O-methyladenosine
  modified_base 39: mod_base = gm
  modified_base 40: mod_base = cm
  modified_base 68: mod_base = OTHER; note = 2'-O-methyladenosine
  modified_base 69: mod_base = OTHER; note = 2'-O-methyladenosine
  modified_base 70: mod_base = cm
  modified_base 71: mod_base = um
  modified_base 72: mod_base = um
  modified_base 73: mod_base = gm
  modified_base 74: mod_base = OTHER; note = 2'-O-methyladenosine
  modified_base 75: mod_base = OTHER; note = 2'-O-methyladenosine
  modified_base 76: mod_base = OTHER; note = 2'-O-methyladenosine
  modified_base 77: mod_base = OTHER; note = 2'-O-methyladenosine
  modified_base 78: mod_base = OTHER; note = 2'-O-methyladenosine
  modified_base 79: mod_base = gm
  modified_base 80: mod_base = um
  modified_base 81: mod_base = gm
  modified_base 82: mod_base = gm
  modified_base 83: mod_base = cm
  modified_base 84: mod_base = OTHER; note = 2'-O-methyladenosine
  modified_base 85: mod_base = cm
  modified_base 86: mod_base = cm
  modified_base 87: mod_base = gm
  modified_base 88: mod_base = OTHER; note = 2'-O-methyladenosine
  modified_base 89: mod_base = gm
  modified_base 90: mod_base = um
  modified_base 91: mod_base = cm
  modified_base 92: mod_base = gm
  modified_base 93: mod_base = gm
  modified_base 94: mod_base = um
  modified_base 95: mod_base = gm
  modified_base 96: mod_base = cm
  modified_base 114: mod_base = OTHER; note = Phosphorothioate (PS) linkage
  modified_base 114: mod_base = gm
  modified_base 115: mod_base = OTHER; note = Phosphorothioate (PS) linkage
  modified_base 115: mod_base = um
  modified_base 116: mod_base = OTHER; note = Phosphorothioate (PS) linkage
  modified_base 116: mod_base = gm
  source 1..116: mol_type = other RNA

SEQ ID NO: 489 - RNA, 126 nt, synthetic construct; identical to SEQ ID NO: 400
  modified_base 1: mod_base = OTHER; note = 2'-O-methyladenosine
  modified_base 2: mod_base = OTHER; note = Phosphorothioate (PS) linkage
  modified_base 2: mod_base = cm
  modified_base 3: mod_base = OTHER; note = Phosphorothioate (PS) linkage
  modified_base 3: mod_base = um
  modified_base 4: mod_base = OTHER; note = Phosphorothioate (PS) linkage
  modified_base 29: mod_base = gm
  modified_base 30: mod_base = cm
  modified_base 31: mod_base = um
  modified_base 32: mod_base = OTHER; note = 2'-O-methyladenosine
  modified_base 33: mod_base = gm
  modified_base 34: mod_base = OTHER; note = 2'-O-methyladenosine
  modified_base 35: mod_base = OTHER; note = 2'-O-methyladenosine
  modified_base 36: mod_base = OTHER; note = 2'-O-methyladenosine
  modified_base 37: mod_base = um
  modified_base 38: mod_base = OTHER; note = 2'-O-methyladenosine
  modified_base 39: mod_base = gm
  modified_base 40: mod_base = cm
  modified_base 68: mod_base = OTHER; note = 2'-O-methyladenosine
  modified_base 69: mod_base = OTHER; note = 2'-O-methyladenosine
  modified_base 70: mod_base = cm
  modified_base 71: mod_base = um
  modified_base 72: mod_base = um
  modified_base 73: mod_base = gm
  modified_base 74: mod_base = OTHER; note = 2'-O-methyladenosine
  modified_base 75: mod_base = OTHER; note = 2'-O-methyladenosine
  modified_base 76: mod_base = OTHER; note = 2'-O-methyladenosine
  modified_base 77: mod_base = OTHER; note = 2'-O-methyladenosine
  modified_base 78: mod_base = OTHER; note = 2'-O-methyladenosine
  modified_base 79: mod_base = gm
  modified_base 80: mod_base = um
  modified_base 81: mod_base = gm
  modified_base 82: mod_base = gm
  modified_base 83: mod_base = cm
  modified_base 84: mod_base = OTHER; note = 2'-O-methyladenosine
  modified_base 85: mod_base = cm
  modified_base 86: mod_base = cm
  modified_base 87: mod_base = gm
  modified_base 88: mod_base = OTHER; note = 2'-O-methyladenosine
  modified_base 89: mod_base = gm
  modified_base 90: mod_base = um
  modified_base 91: mod_base = cm
  modified_base 92: mod_base = gm
  modified_base 93: mod_base = gm
  modified_base 94: mod_base = um
  modified_base 95: mod_base = gm
  modified_base 96: mod_base = cm
  modified_base 124: mod_base = OTHER; note = Phosphorothioate (PS) linkage
  modified_base 124: mod_base = OTHER; note = 2'-O-methyladenosine
  modified_base 125: mod_base = OTHER; note = Phosphorothioate (PS) linkage
  modified_base 125: mod_base = OTHER; note = 2'-O-methyladenosine
  modified_base 126: mod_base = OTHER; note = Phosphorothioate (PS) linkage
  modified_base 126: mod_base = OTHER; note = 2'-O-methyladenosine
  source 1..126: mol_type = other RNA

SEQ ID NO: 490 - RNA, 125 nt, synthetic construct; identical to SEQ ID NO: 401
  modified_base 1: mod_base = OTHER; note = 2'-O-methyladenosine
  modified_base 2: mod_base = OTHER; note = Phosphorothioate (PS) linkage
  modified_base 2: mod_base = cm
  modified_base 3: mod_base = OTHER; note = Phosphorothioate (PS) linkage
  modified_base 3: mod_base = um
  modified_base 4: mod_base = OTHER; note = Phosphorothioate (PS) linkage
  modified_base 29: mod_base = gm
  modified_base 30: mod_base = cm
  modified_base 31: mod_base = um
  modified_base 32: mod_base = OTHER; note = 2'-O-methyladenosine
  modified_base 33: mod_base = gm
  modified_base 34: mod_base = OTHER; note = 2'-O-methyladenosine
  modified_base 35: mod_base = OTHER; note = 2'-O-methyladenosine
  modified_base 36: mod_base = OTHER; note = 2'-O-methyladenosine
  modified_base 37: mod_base = um
  modified_base 38: mod_base = OTHER; note = 2'-O-methyladenosine
  modified_base 39: mod_base = gm
  modified_base 40: mod_base = cm
  modified_base 68: mod_base = OTHER; note = 2'-O-methyladenosine
  modified_base 69: mod_base = OTHER; note = 2'-O-methyladenosine
  modified_base 70: mod_base = cm
  modified_base 71: mod_base = um
  modified_base 72: mod_base = um
  modified_base 73: mod_base = gm
  modified_base 74: mod_base = OTHER; note = 2'-O-methyladenosine
  modified_base 75: mod_base = OTHER; note = 2'-O-methyladenosine
  modified_base 76: mod_base = OTHER; note = 2'-O-methyladenosine
  modified_base 77: mod_base = OTHER; note = 2'-O-methyladenosine
  modified_base 78: mod_base = OTHER; note = 2'-O-methyladenosine
  modified_base 79: mod_base = gm
  modified_base 80: mod_base = um
  modified_base 81: mod_base = gm
  modified_base 82: mod_base = gm
  modified_base 83: mod_base = cm
  modified_base 84: mod_base = OTHER; note = 2'-O-methyladenosine
  modified_base 85: mod_base = cm
  modified_base 86: mod_base = cm
  modified_base 87: mod_base = gm
  modified_base 88: mod_base = OTHER; note = 2'-O-methyladenosine
  modified_base 89: mod_base = gm
  modified_base 90: mod_base = um
  modified_base 91: mod_base = cm
  modified_base 92: mod_base = gm
  modified_base 93: mod_base = gm
  modified_base 94: mod_base = um
  modified_base 95: mod_base = gm
  modified_base 96: mod_base = cm
  modified_base 123: mod_base = OTHER; note = Phosphorothioate (PS) linkage
  modified_base 123: mod_base = cm
  modified_base 124: mod_base = OTHER; note = Phosphorothioate (PS) linkage
  modified_base 124: mod_base = OTHER; note = 2'-O-methyladenosine
  modified_base 125: mod_base = OTHER; note = Phosphorothioate (PS) linkage
  modified_base 125: mod_base = OTHER; note = 2'-O-methyladenosine
  source 1..125: mol_type = other RNA

SEQ ID NO: 491 - RNA, 124 nt, synthetic construct; identical to SEQ ID NO: 402
  modified_base 1: mod_base = OTHER; note = 2'-O-methyladenosine
  modified_base 2: mod_base = OTHER; note = Phosphorothioate (PS) linkage
  modified_base 2: mod_base = cm
  modified_base 3: mod_base = OTHER; note = Phosphorothioate (PS) linkage
  modified_base 3: mod_base = um
  modified_base 4: mod_base = OTHER; note = Phosphorothioate (PS) linkage
  modified_base 29: mod_base = gm
  modified_base 30: mod_base = cm
  modified_base 31: mod_base = um
  modified_base 32: mod_base = OTHER; note = 2'-O-methyladenosine
  modified_base 33: mod_base = gm
  modified_base 34: mod_base = OTHER; note = 2'-O-methyladenosine
  modified_base 35: mod_base = OTHER; note = 2'-O-methyladenosine
  modified_base 36: mod_base = OTHER; note = 2'-O-methyladenosine
  modified_base 37: mod_base = um
  modified_base 38: mod_base = OTHER; note = 2'-O-methyladenosine
  modified_base 39: mod_base = gm
  modified_base 40: mod_base = cm
  modified_base 68: mod_base = OTHER; note = 2'-O-methyladenosine
  modified_base 69: mod_base = OTHER; note = 2'-O-methyladenosine
  modified_base 70: mod_base = cm
  modified_base 71: mod_base = um
  modified_base 72: mod_base = um
  modified_base 73: mod_base = gm
  modified_base 74: mod_base = OTHER; note = 2'-O-methyladenosine
  modified_base 75: mod_base = OTHER; note = 2'-O-methyladenosine
  modified_base 76: mod_base = OTHER; note = 2'-O-methyladenosine
  modified_base 77: mod_base = OTHER; note = 2'-O-methyladenosine
  modified_base 78: mod_base = OTHER; note = 2'-O-methyladenosine
  modified_base 79: mod_base = gm
  modified_base 80: mod_base = um
  modified_base 81: mod_base = gm
  modified_base 82: mod_base = gm
  modified_base 83: mod_base = cm
  modified_base 84: mod_base = OTHER; note = 2'-O-methyladenosine
  modified_base 85: mod_base = cm
  modified_base 86: mod_base = cm
  modified_base 87: mod_base = gm
  modified_base 88: mod_base = OTHER; note = 2'-O-methyladenosine
  modified_base 89: mod_base = gm
  modified_base 90: mod_base = um
  modified_base 91: mod_base = cm
  modified_base 92: mod_base = gm
  modified_base 93: mod_base = gm
  modified_base 94: mod_base = um
  modified_base 95: mod_base = gm
  modified_base 96: mod_base = cm
  modified_base 122: mod_base = OTHER; note = Phosphorothioate (PS) linkage
  modified_base 122: mod_base = gm
  modified_base 123: mod_base = OTHER; note = Phosphorothioate (PS) linkage
  modified_base 123: mod_base = cm
  modified_base 124: mod_base = OTHER; note = Phosphorothioate (PS) linkage
  modified_base 124: mod_base = OTHER; note = 2'-O-methyladenosine
  source 1..124: mol_type = other RNA

SEQ ID NO: 492 - RNA, 123 nt, synthetic construct; identical to SEQ ID NO: 403
  modified_base 1: mod_base = OTHER; note = 2'-O-methyladenosine
  modified_base 2: mod_base = OTHER; note = Phosphorothioate (PS) linkage
  modified_base 2: mod_base = cm
  modified_base 3: mod_base = OTHER; note = Phosphorothioate (PS) linkage
  modified_base 3: mod_base = um
  modified_base 4: mod_base = OTHER; note = Phosphorothioate (PS) linkage
  modified_base 29: mod_base = gm
  modified_base 30: mod_base = cm
  modified_base 31: mod_base = um
  modified_base 32: mod_base = OTHER; note = 2'-O-methyladenosine
  modified_base 33: mod_base = gm
  modified_base 34: mod_base = OTHER; note = 2'-O-methyladenosine
  modified_base 35: mod_base = OTHER; note = 2'-O-methyladenosine
  modified_base 36: mod_base = OTHER; note = 2'-O-methyladenosine
  modified_base 37: mod_base = um
  modified_base 38: mod_base = OTHER; note = 2'-O-methyladenosine
  modified_base 39: mod_base = gm
  modified_base 40: mod_base = cm
  modified_base 68: mod_base = OTHER; note = 2'-O-methyladenosine
  modified_base 69: mod_base = OTHER; note = 2'-O-methyladenosine
  modified_base 70: mod_base = cm
  modified_base 71: mod_base = um
  modified_base 72: mod_base = um
  modified_base 73: mod_base = gm
  modified_base 74: mod_base = OTHER; note = 2'-O-methyladenosine
  modified_base 75: mod_base = OTHER; note = 2'-O-methyladenosine
  modified_base 76: mod_base = OTHER; note = 2'-O-methyladenosine
  modified_base 77: mod_base = OTHER; note = 2'-O-methyladenosine
  modified_base 78: mod_base = OTHER; note = 2'-O-methyladenosine
  modified_base 79: mod_base = gm
  modified_base 80: mod_base = um
  modified_base 81: mod_base = gm
  modified_base 82: mod_base = gm
  modified_base 83: mod_base = cm
  modified_base 84: mod_base = OTHER; note = 2'-O-methyladenosine
  modified_base 85: mod_base = cm
  modified_base 86: mod_base = cm
  modified_base 87: mod_base = gm
  modified_base 88: mod_base = OTHER; note = 2'-O-methyladenosine
  modified_base 89: mod_base = gm
  modified_base 90: mod_base = um
  modified_base 91: mod_base = cm
  modified_base 92: mod_base = gm
  modified_base 93: mod_base = gm
  modified_base 94: mod_base = um
  modified_base 95: mod_base = gm
  modified_base 96: mod_base = cm
  modified_base 121: mod_base = OTHER; note = Phosphorothioate (PS) linkage
  modified_base 121: mod_base = OTHER; note = 2'-O-methyladenosine
  modified_base 122: mod_base = OTHER; note = Phosphorothioate (PS) linkage
  modified_base 122: mod_base = gm
  modified_base 123: mod_base = OTHER; note = Phosphorothioate (PS) linkage
  modified_base 123: mod_base = cm
  source 1..123: mol_type = other RNA

SEQ ID NO: 493 - RNA, 122 nt, synthetic construct; identical to SEQ ID NO: 404
  modified_base 1: mod_base = OTHER; note = 2'-O-methyladenosine
  modified_base 2: mod_base = OTHER; note = Phosphorothioate (PS) linkage
  modified_base 2: mod_base = cm
  modified_base 3: mod_base = OTHER; note = Phosphorothioate (PS) linkage
  modified_base 3: mod_base = um
  modified_base 4: mod_base = OTHER; note = Phosphorothioate (PS) linkage
  modified_base 29: mod_base = gm
  modified_base 30: mod_base = cm
  modified_base 31: mod_base = um
  modified_base 32: mod_base = OTHER; note = 2'-O-methyladenosine
  modified_base 33: mod_base = gm
  modified_base 34: mod_base = OTHER; note = 2'-O-methyladenosine
  modified_base 35: mod_base = OTHER; note = 2'-O-methyladenosine
  modified_base 36: mod_base = OTHER; note = 2'-O-methyladenosine
  modified_base 37: mod_base = um
  modified_base 38: mod_base = OTHER; note = 2'-O-methyladenosine
  modified_base 39: mod_base = gm
  modified_base 40: mod_base = cm
  modified_base 68: mod_base = OTHER; note = 2'-O-methyladenosine
  modified_base 69: mod_base = OTHER; note = 2'-O-methyladenosine
  modified_base 70: mod_base = cm
  modified_base 71: mod_base = um
  modified_base 72: mod_base = um
  modified_base 73: mod_base = gm
  modified_base 74: mod_base = OTHER; note = 2'-O-methyladenosine
  modified_base 75: mod_base = OTHER; note = 2'-O-methyladenosine
  modified_base 76: mod_base = OTHER; note = 2'-O-methyladenosine
  modified_base 77: mod_base = OTHER; note = 2'-O-methyladenosine
  modified_base 78: mod_base = OTHER; note = 2'-O-methyladenosine
  modified_base 79: mod_base = gm
  modified_base 80: mod_base = um
  modified_base 81: mod_base = gm
  modified_base 82: mod_base = gm
  modified_base 83: mod_base = cm
  modified_base 84: mod_base = OTHER; note = 2'-O-methyladenosine
  modified_base 85: mod_base = cm
  modified_base 86: mod_base = cm
  modified_base 87: mod_base = gm
  modified_base 88: mod_base = OTHER; note = 2'-O-methyladenosine
  modified_base 89: mod_base = gm
  modified_base 90: mod_base = um
  modified_base 91: mod_base = cm
  modified_base 92: mod_base = gm
  modified_base 93: mod_base = gm
  modified_base 94: mod_base = um
  modified_base 95: mod_base = gm
  modified_base 96: mod_base = cm
  modified_base 120: mod_base = OTHER; note = Phosphorothioate (PS) linkage
  modified_base 120: mod_base = cm
  modified_base 121: mod_base = OTHER; note = Phosphorothioate (PS) linkage
  modified_base 121: mod_base = OTHER; note = 2'-O-methyladenosine
  modified_base 122: mod_base = OTHER; note = Phosphorothioate (PS) linkage
  modified_base 122: mod_base = gm
  source 1..122: mol_type = other RNA

SEQ ID NO: 494 - RNA, 121 nt, synthetic construct; identical to SEQ ID NO: 405
  modified_base 1: mod_base = OTHER; note = 2'-O-methyladenosine
  modified_base 2: mod_base = OTHER; note = Phosphorothioate (PS) linkage
  modified_base 2: mod_base = cm
  modified_base 3: mod_base = OTHER; note = Phosphorothioate (PS) linkage
  modified_base 3: mod_base = um
  modified_base 4: mod_base = OTHER; note = Phosphorothioate (PS) linkage
  modified_base 29: mod_base = gm
  modified_base 30: mod_base = cm
  modified_base 31: mod_base = um
  modified_base 32: mod_base = OTHER; note = 2'-O-methyladenosine
  modified_base 33: mod_base = gm
  modified_base 34: mod_base = OTHER; note = 2'-O-methyladenosine
  modified_base 35: mod_base = OTHER; note = 2'-O-methyladenosine
  modified_base 36: mod_base = OTHER; note = 2'-O-methyladenosine
  modified_base 37: mod_base = um
  modified_base 38: mod_base = OTHER; note = 2'-O-methyladenosine
  modified_base 39: mod_base = gm
  modified_base 40: mod_base = cm
  modified_base 68: mod_base = OTHER; note = 2'-O-methyladenosine
  modified_base 69: mod_base = OTHER; note = 2'-O-methyladenosine
  modified_base 70: mod_base = cm
  modified_base 71: mod_base = um
  modified_base 72: mod_base = um
  modified_base 73: mod_base = gm
  modified_base 74: mod_base = OTHER; note = 2'-O-methyladenosine
  modified_base 75: mod_base = OTHER; note = 2'-O-methyladenosine
  modified_base 76: mod_base = OTHER; note = 2'-O-methyladenosine
  modified_base 77: mod_base = OTHER; note = 2'-O-methyladenosine
  modified_base 78: mod_base = OTHER; note = 2'-O-methyladenosine
  modified_base 79: mod_base = gm
  modified_base 80: mod_base = um
  modified_base 81: mod_base = gm
  modified_base 82: mod_base = gm
  modified_base 83: mod_base = cm
  modified_base 84: mod_base = OTHER; note = 2'-O-methyladenosine
  modified_base 85: mod_base = cm
  modified_base 86: mod_base = cm
  modified_base 87: mod_base = gm
  modified_base 88: mod_base = OTHER; note = 2'-O-methyladenosine
  modified_base 89: mod_base = gm
  modified_base 90: mod_base = um
  modified_base 91: mod_base = cm
  modified_base 92: mod_base = gm
  modified_base 93: mod_base = gm
  modified_base 94: mod_base = um
  modified_base 95: mod_base = gm
  modified_base 96: mod_base = cm
  modified_base 119: mod_base = OTHER; note = Phosphorothioate (PS) linkage
  modified_base 119: mod_base = gm
  modified_base 120: mod_base = OTHER; note = Phosphorothioate (PS) linkage
  modified_base 120: mod_base = cm
  modified_base 121: mod_base = OTHER; note = Phosphorothioate (PS) linkage
  modified_base 121: mod_base = OTHER; note = 2'-O-methyladenosine
  source 1..121: mol_type = other RNA

SEQ ID NO: 495 - RNA, 120 nt, synthetic construct; identical to SEQ ID NO: 406
  modified_base 1: mod_base = OTHER; note = 2'-O-methyladenosine
  modified_base 2: mod_base = OTHER; note = Phosphorothioate (PS) linkage
  modified_base 2: mod_base = cm
  modified_base 3: mod_base = OTHER; note = Phosphorothioate (PS) linkage
  modified_base 3: mod_base = um
  modified_base 4: mod_base = OTHER; note = Phosphorothioate (PS) linkage
  modified_base 29: mod_base = gm
  modified_base 30: mod_base = cm
  modified_base 31: mod_base = um
  modified_base 32: mod_base = OTHER; note = 2'-O-methyladenosine
  modified_base 33: mod_base = gm
  modified_base 34: mod_base = OTHER; note = 2'-O-methyladenosine
  modified_base 35: mod_base = OTHER; note = 2'-O-methyladenosine
  modified_base 36: mod_base = OTHER; note = 2'-O-methyladenosine
  modified_base 37: mod_base = um
  modified_base 38: mod_base = OTHER; note = 2'-O-methyladenosine
  modified_base 39: mod_base = gm
  modified_base 40: mod_base = cm
  modified_base 68: mod_base = OTHER; note = 2'-O-methyladenosine
  modified_base 69: mod_base = OTHER; note = 2'-O-methyladenosine
  modified_base 70: mod_base = cm
  modified_base 71: mod_base = um
  modified_base 72: mod_base = um
  modified_base 73: mod_base = gm
  modified_base 74: mod_base = OTHER; note = 2'-O-methyladenosine
  modified_base 75: mod_base = OTHER; note = 2'-O-methyladenosine
  modified_base 76: mod_base = OTHER; note = 2'-O-methyladenosine
  modified_base 77: mod_base = OTHER; note = 2'-O-methyladenosine
  modified_base 78: mod_base = OTHER; note = 2'-O-methyladenosine
  modified_base 79: mod_base = gm
  modified_base 80: mod_base = um
  modified_base 81: mod_base = gm
  modified_base 82: mod_base = gm
  modified_base 83: mod_base = cm
  modified_base 84: mod_base = OTHER; note = 2'-O-methyladenosine
  modified_base 85: mod_base = cm
  modified_base 86: mod_base = cm
  modified_base 87: mod_base = gm
  modified_base 88: mod_base = OTHER; note = 2'-O-methyladenosine
  modified_base 89: mod_base = gm
  modified_base 90: mod_base = um
  modified_base 91: mod_base = cm
  modified_base 92: mod_base = gm
  modified_base 93: mod_base = gm
  modified_base 94: mod_base = um
  modified_base 95: mod_base = gm
  modified_base 96: mod_base = cm
  modified_base 118: mod_base = OTHER; note = Phosphorothioate (PS) linkage
  modified_base 118: mod_base = gm
  modified_base 119: mod_base = OTHER; note = Phosphorothioate (PS) linkage
  modified_base 119: mod_base = gm
  modified_base 120: mod_base = OTHER; note = Phosphorothioate (PS) linkage
  modified_base 120: mod_base = cm
  source 1..120: mol_type = other RNA

SEQ ID NO: 496 - RNA, 119 nt, synthetic construct; identical to SEQ ID NO: 407
  modified_base 1: mod_base = OTHER; note = 2'-O-methyladenosine
  modified_base 2: mod_base = OTHER; note = Phosphorothioate (PS) linkage
  modified_base 2: mod_base = cm
  modified_base 3: mod_base = OTHER; note = Phosphorothioate (PS) linkage
  modified_base 3: mod_base = um
  modified_base 4: mod_base = OTHER; note = Phosphorothioate (PS) linkage
  modified_base 29: mod_base = gm
  modified_base 30: mod_base = cm
  modified_base 31: mod_base = um
  modified_base 32: mod_base = OTHER; note = 2'-O-methyladenosine
  modified_base 33: mod_base = gm
  modified_base 34: mod_base = OTHER; note = 2'-O-methyladenosine
  modified_base 35: mod_base = OTHER; note = 2'-O-methyladenosine
  modified_base 36: mod_base = OTHER; note = 2'-O-methyladenosine
  modified_base 37: mod_base = um
  modified_base 38: mod_base = OTHER; note = 2'-O-methyladenosine
  modified_base 39: mod_base = gm
  modified_base 40: mod_base = cm
  modified_base 68: mod_base = OTHER; note = 2'-O-methyladenosine
  modified_base 69: mod_base = OTHER; note = 2'-O-methyladenosine
  modified_base 70: mod_base = cm
  modified_base 71: mod_base = um
  modified_base 72: mod_base = um
  modified_base 73: mod_base = gm
  modified_base 74: mod_base = OTHER; note = 2'-O-methyladenosine
  modified_base 75: mod_base = OTHER; note = 2'-O-methyladenosine
  modified_base 76: mod_base = OTHER; note = 2'-O-methyladenosine
  modified_base 77: mod_base = OTHER; note = 2'-O-methyladenosine
  modified_base 78: mod_base = OTHER; note = 2'-O-methyladenosine
  modified_base 79: mod_base = gm
  modified_base 80: mod_base = um
  modified_base 81: mod_base = gm
  modified_base 82: mod_base = gm
  modified_base 83: mod_base = cm
  modified_base 84: mod_base = OTHER; note = 2'-O-methyladenosine
  modified_base 85: mod_base = cm
  modified_base 86: mod_base = cm
  modified_base 87: mod_base = gm
  modified_base 88: mod_base = OTHER; note = 2'-O-methyladenosine
  modified_base 89: mod_base = gm
  modified_base 90: mod_base = um
  modified_base 91: mod_base = cm
  modified_base 92: mod_base = gm
  modified_base 93: mod_base = gm
  modified_base 94: mod_base = um
  modified_base 95: mod_base = gm
  modified_base 96: mod_base = cm
  modified_base 117: mod_base = OTHER; note = Phosphorothioate (PS) linkage
  modified_base 117: mod_base = um
  modified_base 118: mod_base = OTHER; note = Phosphorothioate (PS) linkage
  modified_base 118: mod_base = gm
  modified_base 119: mod_base = OTHER; note = Phosphorothioate (PS) linkage
  modified_base 119: mod_base = gm
  source 1..119: mol_type = other RNA

SEQ ID NO: 497 - RNA, 118 nt, synthetic construct; identical to SEQ ID NO: 408
  modified_base 1: mod_base = OTHER; note = 2'-O-methyladenosine
  modified_base 2: mod_base = OTHER; note = Phosphorothioate (PS) linkage
  modified_base 2: mod_base = cm
  modified_base 3: mod_base = OTHER; note = Phosphorothioate (PS) linkage
  modified_base 3: mod_base = um
  modified_base 4: mod_base = OTHER; note = Phosphorothioate (PS) linkage
  modified_base 29: mod_base = gm
  modified_base 30: mod_base = cm
  modified_base 31: mod_base = um
  modified_base 32: mod_base = OTHER; note = 2'-O-methyladenosine
  modified_base 33: mod_base = gm
  modified_base 34: mod_base = OTHER; note = 2'-O-methyladenosine
  modified_base 35: mod_base = OTHER; note = 2'-O-methyladenosine
  modified_base 36: mod_base = OTHER; note = 2'-O-methyladenosine
  modified_base 37: mod_base = um
  modified_base 38: mod_base = OTHER; note = 2'-O-methyladenosine
  modified_base 39: mod_base = gm
  modified_base 40: mod_base = cm
  modified_base 68: mod_base = OTHER; note = 2'-O-methyladenosine
  modified_base 69: mod_base = OTHER; note = 2'-O-methyladenosine
  modified_base 70: mod_base = cm
  modified_base 71: mod_base = um
  modified_base 72: mod_base = um
  modified_base 73: mod_base = gm
  modified_base 74: mod_base = OTHER; note = 2'-O-methyladenosine
  modified_base 75: mod_base = OTHER; note = 2'-O-methyladenosine
  modified_base 76: mod_base = OTHER; note = 2'-O-methyladenosine
  modified_base 77: mod_base = OTHER; note = 2'-O-methyladenosine
  modified_base 78: mod_base = OTHER; note = 2'-O-methyladenosine
  modified_base 79: mod_base = gm
  modified_base 80: mod_base = um
  modified_base 81: mod_base = gm
  modified_base 82: mod_base = gm
  modified_base 83: mod_base = cm
  modified_base 84: mod_base = OTHER; note = 2'-O-methyladenosine
  modified_base 85: mod_base = cm
  modified_base 86: mod_base = cm
  modified_base 87: mod_base = gm
  modified_base 88: mod_base = OTHER; note = 2'-O-methyladenosine
  modified_base 89: mod_base = gm
  modified_base 90: mod_base = um
  modified_base 91: mod_base = cm
  modified_base 92: mod_base = gm
  modified_base 93: mod_base = gm
  modified_base 94: mod_base = um
  modified_base 95: mod_base = gm
  modified_base 96: mod_base = cm
  modified_base 116: mod_base = OTHER; note = Phosphorothioate (PS) linkage
  modified_base 116: mod_base = gm
  modified_base 117: mod_base = OTHER; note = Phosphorothioate (PS) linkage
  modified_base 117: mod_base = um
  modified_base 118: mod_base = OTHER; note = Phosphorothioate (PS) linkage
  modified_base 118: mod_base = gm
  source 1..118: mol_type = other RNA

SEQ ID NO: 498 - RNA, 100 nt, synthetic construct
  source 1..100: mol_type = other RNA
ttacaccttacgaggccactgttttagagctagaaatagcaagttaaaataaggctagtccgttatcaacttgaaaaagtggcaccgagtcggtgctttt

SEQ ID NO: 499 - RNA, 100 nt, synthetic construct
  source 1..100: mol_type = other RNA
taagtaatttacaccttacggttttagagctagaaatagcaagttaaaataaggctagtccgttatcaacttgaaaaagtggcaccgagtcggtgctttt

SEQ ID NO: 500 - RNA, 100 nt, synthetic construct
  source 1..100: mol_type = other RNA
tacccagcagcttaagatttgttttagagctagaaatagcaagttaaaataaggctagtccgttatcaacttgaaaaagtggcaccgagtcggtgctttt

SEQ ID NO: 501 - RNA, 100 nt, synthetic construct
  source 1..100: mol_type = other RNA
cacccaaaggattgaggtctgttttagagctagaaatagcaagttaaaataaggctagtccgttatcaacttgaaaaagtggcaccgagtcggtgctttt

SEQ ID NO: 502 - RNA, 100 nt, synthetic construct
  source 1..100: mol_type = other RNA
cccatacacccaaaggattggttttagagctagaaatagcaagttaaaataaggctagtccgttatcaacttgaaaaagtggcaccgagtcggtgctttt

SEQ ID NO: 503 - RNA, 100 nt, synthetic construct
  source 1..100: mol_type = other RNA
gctacgacccatacacccaagttttagagctagaaatagcaagttaaaataaggctagtccgttatcaacttgaaaaagtggcaccgagtcggtgctttt

SEQ ID NO: 504 - RNA, 100 nt, synthetic construct
  source 1..100: mol_type = other RNA
aagcctgtggttttggtcttgttttagagctagaaatagcaagttaaaataaggctagtccgttatcaacttgaaaaagtggcaccgagtcggtgctttt

SEQ ID NO: 505 - RNA, 100 nt, synthetic construct
  source 1..100: mol_type = other RNA
ttcactcaagcctgtggtttgttttagagctagaaatagcaagttaaaataaggctagtccgttatcaacttgaaaaagtggcaccgagtcggtgctttt

SEQ ID NO: 506 - RNA, 100 nt, synthetic construct
  source 1..100: mol_type = other RNA
gtgcccttcactcaagcctggttttagagctagaaatagcaagttaaaataaggctagtccgttatcaacttgaaaaagtggcaccgagtcggtgctttt

SEQ ID NO: 507 - RNA, 100 nt, synthetic construct
  source 1..100: mol_type = other RNA
taagactacctttctccaaagttttagagctagaaatagcaagttaaaataaggctagtccgttatcaacttgaaaaagtggcaccgagtcggtgctttt

SEQ ID NO: 508 - RNA, 100 nt, synthetic construct
  source 1..100: mol_type = other RNA
ttacttcttttttaggaacagttttagagctagaaatagcaagttaaaataaggctagtccgttatcaacttgaaaaagtggcaccgagtcggtgctttt

SEQ ID NO: 509 - RNA, 100 nt, synthetic construct
  source 1..100: mol_type = other RNA
gggtcgtagcgaactgagaagttttagagctagaaatagcaagttaaaataaggctagtccgttatcaacttgaaaaagtggcaccgagtcggtgctttt

SEQ ID NO: 510 - RNA, 100 nt, synthetic construct
  source 1..100: mol_type = other RNA
tgtaaattacttactgttaagttttagagctagaaatagcaagttaaaataaggctagtccgttatcaacttgaaaaagtggcaccgagtcggtgctttt

SEQ ID NO: 511 - RNA, 100 nt, synthetic construct
  source 1..100: mol_type = other RNA
tggcattttacttcttttttgttttagagctagaaatagcaagttaaaataaggctagtccgttatcaacttgaaaaagtggcaccgagtcggtgctttt

SEQ ID NO: 512 - RNA, 100 nt, synthetic construct
  source 1..100: mol_type = other RNA
tgggtcgtagcgaactgagagttttagagctagaaatagcaagttaaaataaggctagtccgttatcaacttgaaaaagtggcaccgagtcggtgctttt

SEQ ID NO: 513 - RNA, 100 nt, synthetic construct
  source 1..100: mol_type = other RNA
agaaaccgagtggcctcgtagttttagagctagaaatagcaagttaaaataaggctagtccgttatcaacttgaaaaagtggcaccgagtcggtgctttt

SEQ ID NO: 514 - RNA, 100 nt, synthetic construct
  source 1..100: mol_type = other RNA
agtcttaagagagttctcaggttttagagctagaaatagcaagttaaaataaggctagtccgttatcaacttgaaaaagtggcaccgagtcggtgctttt

SEQ ID NO: 515 - RNA, 100 nt, synthetic construct
  source 1..100: mol_type = other RNA
cctcaatcctttgggtgtatgttttagagctagaaatagcaagttaaaataaggctagtccgttatcaacttgaaaaagtggcaccgagtcggtgctttt

SEQ ID NO: 516 - RNA, 100 nt, synthetic construct
  source 1..100: mol_type = other RNA
tcgattactgagaaaccgaggttttagagctagaaatagcaagttaaaataaggctagtccgttatcaacttgaaaaagtggcaccgagtcggtgctttt

SEQ ID NO: 517 - RNA, 100 nt, synthetic construct
  source 1..100: mol_type = other RNA
gaagggcaccatttggagaagttttagagctagaaatagcaagttaaaataaggctagtccgttatcaacttgaaaaagtggcaccgagtcggtgctttt

SEQ ID NO: 518 - RNA, 100 nt, synthetic construct
  source 1..100: mol_type = other RNA
acctcaatcctttgggtgtagttttagagctagaaatagcaagttaaaataaggctagtccgttatcaacttgaaaaagtggcaccgagtcggtgctttt

SEQ ID NO: 519 - RNA, 100 nt, synthetic construct
  source 1..100: mol_type = other RNA
cttgagtgaagggcaccattgttttagagctagaaatagcaagttaaaataaggctagtccgttatcaacttgaaaaagtggcaccgagtcggtgctttt

SEQ ID NO: 520 - RNA, 100 nt, synthetic construct
  source 1..100: mol_type = other RNA
gtccaagacctcaatcctttgttttagagctagaaatagcaagttaaaataaggctagtccgttatcaacttgaaaaagtggcaccgagtcggtgctttt

SEQ ID NO: 521 - RNA, 100 nt, synthetic construct
  source 1..100: mol_type = other RNA
aaaccacaggcttgagtgaagttttagagctagaaatagcaagttaaaataaggctagtccgttatcaacttgaaaaagtggcaccgagtcggtgctttt

SEQ ID NO: 522 - RNA, 100 nt, synthetic construct
  source 1..100: mol_type = other RNA
tgtccaagacctcaatccttgttttagagctagaaatagcaagttaaaataaggctagtccgttatcaacttgaaaaagtggcaccgagtcggtgctttt

SEQ ID NO: 523 - RNA, 100 nt, synthetic construct
  source 1..100: mol_type = other RNA
aaaaccacaggcttgagtgagttttagagctagaaatagcaagttaaaataaggctagtccgttatcaacttgaaaaagtggcaccgagtcggtgctttt

SEQ ID NO: 524 - RNA, 100 nt, synthetic construct
  source 1..100: mol_type = other RNA
agccaaaatcttaagctgctgttttagagctagaaatagcaagttaaaataaggctagtccgttatcaacttgaaaaagtggcaccgagtcggtgctttt

SEQ ID NO: 525 - RNA, 100 nt, synthetic construct
  source 1..100: mol_type = other RNA
gttcctaagaccaaaaccacgttttagagctagaaatagcaagttaaaataaggctagtccgttatcaacttgaaaaagtggcaccgagtcggtgctttt

SEQ ID NO: 526 - RNA, 100 nt, synthetic construct
  source 1..100: mol_type = other RNA
cagccaaaatcttaagctgcgttttagagctagaaatagcaagttaaaataaggctagtccgttatcaacttgaaaaagtggcaccgagtcggtgctttt

SEQ ID NO: 527 - RNA, 100 nt, synthetic construct; identical to SEQ ID NO: 498
  modified_base 1: mod_base = um
  modified_base 2: mod_base = OTHER; note = Phosphorothioate (PS) linkage
  modified_base 2: mod_base = um
  modified_base 3: mod_base = OTHER; note = Phosphorothioate (PS) linkage
  modified_base 3: mod_base = OTHER; note = 2'-O-methyladenosine
  modified_base 4: mod_base = OTHER; note = Phosphorothioate (PS) linkage
  modified_base 29: mod_base = gm
  modified_base 30: mod_base = cm
  modified_base 31: mod_base = um
  modified_base 32: mod_base = OTHER; note = 2'-O-methyladenosine
  modified_base 33: mod_base = gm
  modified_base 34: mod_base = OTHER; note = 2'-O-methyladenosine
  modified_base 35: mod_base = OTHER; note = 2'-O-methyladenosine
  modified_base 36: mod_base = OTHER; note = 2'-O-methyladenosine
  modified_base 37: mod_base = um
  modified_base 38: mod_base = OTHER; note = 2'-O-methyladenosine
  modified_base 39: mod_base = gm
  modified_base 40: mod_base = cm
  modified_base 68: mod_base = OTHER; note = 2'-O-methyladenosine
  modified_base 69: mod_base = OTHER; note = 2'-O-methyladenosine
  modified_base 70: mod_base = cm
  modified_base 71: mod_base = um
  modified_base 72: mod_base = um
  modified_base 73: mod_base = gm
  modified_base 74: mod_base = OTHER; note = 2'-O-methyladenosine
  modified_base 75: mod_base = OTHER; note = 2'-O-methyladenosine
  modified_base 76: mod_base = OTHER; note = 2'-O-methyladenosine
  modified_base 77: mod_base = OTHER; note = 2'-O-methyladenosine
  modified_base 78: mod_base = OTHER; note = 2'-O-methyladenosine
  modified_base 79: mod_base = gm
  modified_base 80: mod_base = um
  modified_base 81: mod_base = gm
  modified_base 82: mod_base = gm
  modified_base 83: mod_base = cm
  modified_base 84: mod_base = OTHER; note = 2'-O-methyladenosine
  modified_base 85: mod_base = cm
  modified_base 86: mod_base = cm
  modified_base 87: mod_base = gm
  modified_base 88: mod_base = OTHER; note = 2'-O-methyladenosine
  modified_base 89: mod_base = gm
  modified_base 90: mod_base = um
  modified_base 91: mod_base = cm
  modified_base 92: mod_base = gm
  modified_base 93: mod_base = gm
  modified_base 94: mod_base = um
  modified_base 95: mod_base = gm
  modified_base 96: mod_base = cm
  modified_base 97: mod_base = um
  modified_base 98: mod_base = OTHER; note = Phosphorothioate (PS) linkage
  modified_base 98: mod_base = um
  modified_base 99: mod_base = OTHER; note = Phosphorothioate (PS) linkage
  modified_base 99: mod_base = um
  modified_base 100: mod_base = OTHER; note = Phosphorothioate (PS) linkage
  modified_base 100: mod_base = um
  source 1..100: mol_type = other RNA

SEQ ID NO: 528 - RNA, 100 nt, synthetic construct; identical to SEQ ID NO: 499
  modified_base 1: mod_base = um
  modified_base 2: mod_base = OTHER; note = Phosphorothioate (PS) linkage
  modified_base 2: mod_base = OTHER; note = 2'-O-methyladenosine
  modified_base 3: mod_base = OTHER; note = Phosphorothioate (PS) linkage
  modified_base 3: mod_base = OTHER; note = 2'-O-methyladenosine
  modified_base 4: mod_base = OTHER; note = Phosphorothioate (PS) linkage
  modified_base 29: mod_base = gm
  modified_base 30: mod_base = cm
  modified_base 31: mod_base = um
  modified_base 32: mod_base = OTHER; note = 2'-O-methyladenosine
  modified_base 33: mod_base = gm
  modified_base 34: mod_base = OTHER; note = 2'-O-methyladenosine
  modified_base 35: mod_base = OTHER; note = 2'-O-methyladenosine
  modified_base 36: mod_base = OTHER; note = 2'-O-methyladenosine
  modified_base 37: mod_base = um
  modified_base 38: mod_base = OTHER; note = 2'-O-methyladenosine
  modified_base 39: mod_base = gm
  modified_base 40: mod_base = cm
  modified_base 68: mod_base = OTHER; note = 2'-O-methyladenosine
  modified_base 69: mod_base = OTHER; note = 2'-O-methyladenosine
  modified_base 70: mod_base = cm
  modified_base 71: mod_base = um
  modified_base 72: mod_base = um
  modified_base 73: mod_base = gm
  modified_base 74: mod_base = OTHER; note = 2'-O-methyladenosine
  modified_base 75: mod_base = OTHER; note = 2'-O-methyladenosine
  modified_base 76: mod_base = OTHER; note = 2'-O-methyladenosine
  modified_base 77: mod_base = OTHER; note = 2'-O-methyladenosine
  modified_base 78: mod_base = OTHER; note = 2'-O-methyladenosine
  modified_base 79: mod_base = gm
  modified_base 80: mod_base = um
  modified_base 81: mod_base = gm
  modified_base 82: mod_base = gm
  modified_base 83: mod_base = cm
  modified_base 84: mod_base = OTHER; note = 2'-O-methyladenosine
  modified_base 85: mod_base = cm
  modified_base 86: mod_base = cm
  modified_base 87: mod_base = gm
  modified_base 88: mod_base = OTHER; note = 2'-O-methyladenosine
  modified_base 89: mod_base = gm
  modified_base 90: mod_base = um
  modified_base 91: mod_base = cm
  modified_base 92: mod_base = gm
  modified_base 93: mod_base = gm
  modified_base 94: mod_base = um
  modified_base 95: mod_base = gm
  modified_base 96: mod_base = cm
  modified_base 97: mod_base = um
  modified_base 98: mod_base = OTHER; note = Phosphorothioate (PS) linkage
  modified_base 98: mod_base = um
  modified_base 99: mod_base = OTHER; note = Phosphorothioate (PS) linkage
  modified_base 99: mod_base = um
  modified_base 100: mod_base = OTHER; note = Phosphorothioate (PS) linkage
  modified_base 100: mod_base = um
  source 1..100: mol_type = other RNA

SEQ ID NO: 529 - RNA, 100 nt, synthetic construct; identical to SEQ ID NO: 500
  modified_base 1: mod_base = um
  modified_base 2: mod_base = OTHER; note = Phosphorothioate (PS) linkage
  modified_base 2: mod_base = OTHER; note = 2'-O-methyladenosine
  modified_base 3: mod_base = OTHER; note = Phosphorothioate (PS) linkage
  modified_base 3: mod_base = cm
  modified_base 4: mod_base = OTHER; note = Phosphorothioate (PS) linkage
  modified_base 29: mod_base = gm
  modified_base 30: mod_base = cm
  modified_base 31: mod_base = um
  modified_base 32: mod_base = OTHER; note = 2'-O-methyladenosine
  modified_base 33: mod_base = gm
  modified_base 34: mod_base = OTHER; note = 2'-O-methyladenosine
  modified_base 35: mod_base = OTHER; note = 2'-O-methyladenosine
  modified_base 36: mod_base = OTHER; note = 2'-O-methyladenosine
  modified_base 37: mod_base = um
  modified_base 38: mod_base = OTHER; note = 2'-O-methyladenosine
  modified_base 39: mod_base = gm
  modified_base 40: mod_base = cm
  modified_base 68: mod_base = OTHER; note = 2'-O-methyladenosine
  modified_base 69: mod_base = OTHER; note = 2'-O-methyladenosine
  modified_base 70: mod_base = cm
  modified_base 71: mod_base = um
  modified_base 72: mod_base = um
  modified_base 73: mod_base = gm
  modified_base 74: mod_base = OTHER; note = 2'-O-methyladenosine
  modified_base 75: mod_base = OTHER; note = 2'-O-methyladenosine
  modified_base 76: mod_base = OTHER; note = 2'-O-methyladenosine
  modified_base 77: mod_base = OTHER; note = 2'-O-methyladenosine
  modified_base 78: mod_base = OTHER; note = 2'-O-methyladenosine
  modified_base 79: mod_base = gm
  modified_base 80: mod_base = um
  modified_base 81: mod_base = gm
  modified_base 82: mod_base = gm
  modified_base 83: mod_base = cm
  modified_base 84: mod_base = OTHER; note = 2'-O-methyladenosine
  modified_base 85: mod_base = cm
  modified_base 86: mod_base = cm
  modified_base 87: mod_base = gm
  modified_base 88: mod_base = OTHER; note = 2'-O-methyladenosine
  modified_base 89: mod_base = gm
  modified_base 90: mod_base = um
  modified_base 91: mod_base = cm
  modified_base 92: mod_base = gm
  modified_base 93: mod_base = gm
  modified_base 94: mod_base = um
  modified_base 95: mod_base = gm
  modified_base 96: mod_base = cm
  modified_base 97: mod_base = um
  modified_base 98: mod_base = OTHER; note = Phosphorothioate (PS) linkage
  modified_base 98: mod_base = um
  modified_base 99: mod_base = OTHER; note = Phosphorothioate (PS) linkage
  modified_base 99: mod_base = um
  modified_base 100: mod_base = OTHER; note = Phosphorothioate (PS) linkage
  modified_base 100: mod_base = um
  source 1..100: mol_type = other RNA

SEQ ID NO: 530 - RNA, 100 nt, synthetic construct; identical to SEQ ID NO: 501
  modified_base 1: mod_base = cm
  modified_base 2: mod_base = OTHER; note = Phosphorothioate (PS) linkage
  modified_base 2: mod_base = OTHER; note = 2'-O-methyladenosine
  modified_base 3: mod_base = OTHER; note = Phosphorothioate (PS) linkage
  modified_base 3: mod_base = cm
  modified_base 4: mod_base = OTHER; note = Phosphorothioate (PS) linkage
  modified_base 29: mod_base = gm
  modified_base 30: mod_base = cm
  modified_base 31: mod_base = um
  modified_base 32: mod_base = OTHER; note = 2'-O-methyladenosine
  modified_base 33: mod_base = gm
  modified_base 34: mod_base = OTHER; note = 2'-O-methyladenosine
  modified_base 35: mod_base = OTHER; note = 2'-O-methyladenosine
  modified_base 36: mod_base = OTHER; note = 2'-O-methyladenosine
  modified_base 37: mod_base = um
  modified_base 38: mod_base = OTHER; note = 2'-O-methyladenosine
  modified_base 39: mod_base = gm
  modified_base 40: mod_base = cm
  modified_base 68: mod_base = OTHER; note = 2'-O-methyladenosine
  modified_base 69: mod_base = OTHER; note = 2'-O-methyladenosine
  modified_base 70: mod_base = cm
  modified_base 71: mod_base = um
  modified_base 72: mod_base = um
  modified_base 73: mod_base = gm
  modified_base 74: mod_base = OTHER; note = 2'-O-methyladenosine
  modified_base 75: mod_base = OTHER; note = 2'-O-methyladenosine
  modified_base 76: mod_base = OTHER; note = 2'-O-methyladenosine
  modified_base 77: mod_base = OTHER; note = 2'-O-methyladenosine
  modified_base 78: mod_base = OTHER; note = 2'-O-methyladenosine
  modified_base 79: mod_base = gm
  modified_base 80: mod_base = um
  modified_base 81: mod_base = gm
  modified_base 82: mod_base = gm
  modified_base 83: mod_base = cm
  modified_base 84: mod_base = OTHER; note = 2'-O-methyladenosine
  modified_base 85: mod_base = cm
  modified_base 86: mod_base = cm
  modified_base 87: mod_base = gm
  modified_base 88: mod_base = OTHER; note = 2'-O-methyladenosine
  modified_base 89: mod_base = gm
  modified_base 90: mod_base = um
  modified_base 91: mod_base = cm
  modified_base 92: mod_base = gm
  modified_base 93: mod_base = gm
  modified_base 94: mod_base = um
  modified_base 95: mod_base = gm
  modified_base 96: mod_base = cm
  modified_base 97: mod_base = um
  modified_base 98: mod_base = OTHER; note = Phosphorothioate (PS) linkage
  modified_base 98: mod_base = um
  modified_base 99: mod_base = OTHER; note = Phosphorothioate (PS) linkage
  modified_base 99: mod_base = um
  modified_base 100: mod_base = OTHER; note = Phosphorothioate (PS) linkage
  modified_base 100: mod_base = um
  source 1..100: mol_type = other RNA

SEQ ID NO: 531 - RNA, 100 nt, synthetic construct; identical to SEQ ID NO: 502
  modified_base 1: mod_base = cm
  modified_base 2: mod_base = OTHER; note = Phosphorothioate (PS) linkage
  modified_base 2: mod_base = cm
  modified_base 3: mod_base = OTHER; note = Phosphorothioate (PS) linkage
  modified_base 3: mod_base = cm
  modified_base 4: mod_base = OTHER; note = Phosphorothioate (PS) linkage
  modified_base 29: mod_base = gm
  modified_base 30: mod_base = cm
  modified_base 31: mod_base = um
  modified_base 32: mod_base = OTHER; note = 2'-O-methyladenosine
  modified_base 33: mod_base = gm
  modified_base 34: mod_base = OTHER; note = 2'-O-methyladenosine
  modified_base 35: mod_base = OTHER; note = 2'-O-methyladenosine
  modified_base 36: mod_base = OTHER; note = 2'-O-methyladenosine
  modified_base 37: mod_base = um
  modified_base 38: mod_base = OTHER; note = 2'-O-methyladenosine
  modified_base 39: mod_base = gm
  modified_base 40: mod_base = cm
  modified_base 68: mod_base = OTHER; note = 2'-O-methyladenosine
  modified_base 69: mod_base = OTHER; note = 2'-O-methyladenosine
  modified_base 70: mod_base = cm
  modified_base 71: mod_base = um
  modified_base 72: mod_base = um
  modified_base 73: mod_base = gm
  modified_base 74: mod_base = OTHER; note = 2'-O-methyladenosine
  modified_base 75: mod_base = OTHER; note = 2'-O-methyladenosine
  modified_base 76: mod_base = OTHER; note = 2'-O-methyladenosine
  modified_base 77: mod_base = OTHER; note = 2'-O-methyladenosine
  modified_base 78: mod_base = OTHER; note = 2'-O-methyladenosine
  modified_base 79: mod_base = gm
  modified_base 80: mod_base = um
  modified_base 81: mod_base = gm
  modified_base 82: mod_base = gm
  modified_base 83: mod_base = cm
  modified_base 84: mod_base = OTHER; note = 2'-O-methyladenosine
  modified_base 85: mod_base = cm
  modified_base 86: mod_base = cm
  modified_base 87: mod_base = gm
  modified_base 88: mod_base = OTHER; note = 2'-O-methyladenosine
  modified_base 89: mod_base = gm
  modified_base 90: mod_base = um
  modified_base 91: mod_base = cm
  modified_base 92: mod_base = gm
  modified_base 93: mod_base = gm
  modified_base 94: mod_base = um
  modified_base 95: mod_base = gm
  modified_base 96: mod_base = cm
  modified_base 97: mod_base = um
  modified_base 98: mod_base = OTHER; note = Phosphorothioate (PS) linkage
  modified_base 98: mod_base = um
  modified_base 99: mod_base = OTHER; note = Phosphorothioate (PS) linkage
  modified_base 99: mod_base = um
  modified_base 100: mod_base = OTHER; note = Phosphorothioate (PS) linkage
  modified_base 100: mod_base = um
  source 1..100: mol_type = other RNA

SEQ ID NO: 532 - RNA, 100 nt, synthetic construct; identical to SEQ ID NO: 503
  modified_base 1: mod_base = gm
  modified_base 2: mod_base = OTHER; note = Phosphorothioate (PS) linkage
  modified_base 2: mod_base = cm
  modified_base 3: mod_base = OTHER; note = Phosphorothioate (PS) linkage
  modified_base 3: mod_base = um
  modified_base 4: mod_base = OTHER; note = Phosphorothioate (PS) linkage
  modified_base 29: mod_base = gm
  modified_base 30: mod_base = cm
  modified_base 31: mod_base = um
  modified_base 32: mod_base = OTHER; note = 2'-O-methyladenosine
  modified_base 33: mod_base = gm
  modified_base 34: mod_base = OTHER; note = 2'-O-methyladenosine
  modified_base 35: mod_base = OTHER; note = 2'-O-methyladenosine
  modified_base 36: mod_base = OTHER; note = 2'-O-methyladenosine
  modified_base 37: mod_base = um
  modified_base 38: mod_base = OTHER; note = 2'-O-methyladenosine
  modified_base 39: mod_base = gm
  modified_base 40: mod_base = cm
  modified_base 68: mod_base = OTHER; note = 2'-O-methyladenosine
  modified_base 69: mod_base = OTHER; note = 2'-O-methyladenosine
  modified_base 70: mod_base = cm
  modified_base 71: mod_base = um
  modified_base 72: mod_base = um
  modified_base 73: mod_base = gm
  modified_base 74: mod_base = OTHER; note = 2'-O-methyladenosine
  modified_base 75: mod_base = OTHER; note = 2'-O-methyladenosine
  modified_base 76: mod_base = OTHER; note = 2'-O-methyladenosine
  modified_base 77: mod_base = OTHER; note = 2'-O-methyladenosine
  modified_base 78: mod_base = OTHER; note = 2'-O-methyladenosine
  modified_base 79: mod_base = gm
  modified_base 80: mod_base = um
  modified_base 81: mod_base = gm
  modified_base 82: mod_base = gm
  modified_base 83: mod_base = cm
  modified_base 84: mod_base = OTHER; note = 2'-O-methyladenosine
  modified_base 85: mod_base = cm
  modified_base 86: mod_base = cm
  modified_base 87: mod_base = gm
  modified_base 88: mod_base = OTHER; note = 2'-O-methyladenosine
  modified_base 89: mod_base = gm
  modified_base 90: mod_base = um
  modified_base 91: mod_base = cm
  modified_base 92: mod_base = gm
  modified_base 93: mod_base = gm
  modified_base 94: mod_base = um
  modified_base 95: mod_base = gm
  modified_base 96: mod_base = cm
  modified_base 97: mod_base = um
  modified_base 98: mod_base = OTHER; note = Phosphorothioate (PS) linkage
  modified_base 98: mod_base = um
  modified_base 99: mod_base = OTHER; note = Phosphorothioate (PS) linkage
  modified_base 99: mod_base = um
  modified_base 100: mod_base = OTHER; note = Phosphorothioate (PS) linkage
  modified_base 100: mod_base = um
  source 1..100: mol_type = other RNA

SEQ ID NO: 533 - RNA, 100 nt, synthetic construct; identical to SEQ ID NO: 504
  modified_base 1: mod_base = OTHER; note = 2'-O-methyladenosine
  modified_base 2: mod_base = OTHER; note = Phosphorothioate (PS) linkage
  modified_base 2: mod_base = OTHER; note = 2'-O-methyladenosine
  modified_base 3: mod_base = OTHER; note = Phosphorothioate (PS) linkage
  modified_base 3: mod_base = gm
  modified_base 4: mod_base = OTHER; note = Phosphorothioate (PS) linkage
  modified_base 29: mod_base = gm
  modified_base 30: mod_base = cm
  modified_base 31: mod_base = um
  modified_base 32: mod_base = OTHER; note = 2'-O-methyladenosine
  modified_base 33: mod_base = gm
  modified_base 34: mod_base = OTHER; note = 2'-O-methyladenosine
  modified_base 35: mod_base = OTHER; note = 2'-O-methyladenosine
  modified_base 36: mod_base = OTHER; note = 2'-O-methyladenosine
  modified_base 37: mod_base = um
  modified_base 38: mod_base = OTHER; note = 2'-O-methyladenosine
  modified_base 39: mod_base = gm
  modified_base 40: mod_base = cm
  modified_base 68: mod_base = OTHER; note = 2'-O-methyladenosine
  modified_base 69: mod_base = OTHER; note = 2'-O-methyladenosine
  modified_base 70: mod_base = cm
  modified_base 71: mod_base = um
  modified_base 72: mod_base = um
  modified_base 73: mod_base = gm
  modified_base 74: mod_base = OTHER; note = 2'-O-methyladenosine
  modified_base 75: mod_base = OTHER; note = 2'-O-methyladenosine
  modified_base 76: mod_base = OTHER; note = 2'-O-methyladenosine
  modified_base 77: mod_base = OTHER; note = 2'-O-methyladenosine
  modified_base 78: mod_base = OTHER; note = 2'-O-methyladenosine
  modified_base 79: mod_base = gm
  modified_base 80: mod_base = um
  modified_base 81: mod_base = gm
  modified_base 82: mod_base = gm
  modified_base 83: mod_base = cm
  modified_base 84: mod_base = OTHER; note = 2'-O-methyladenosine
  modified_base 85: mod_base = cm
  modified_base 86: mod_base = cm
  modified_base 87: mod_base = gm
  modified_base 88: mod_base = OTHER; note = 2'-O-methyladenosine
  modified_base 89: mod_base = gm
  modified_base 90: mod_base = um
  modified_base 91: mod_base = cm
  modified_base 92: mod_base = gm
  modified_base 93: mod_base = gm
  modified_base 94: mod_base = um
  modified_base 95: mod_base = gm
  modified_base 96: mod_base = cm
  modified_base 97: mod_base = um
  modified_base 98: mod_base = OTHER; note = Phosphorothioate (PS) linkage
  modified_base 98: mod_base = um
  modified_base 99: mod_base = OTHER; note = Phosphorothioate (PS) linkage
  modified_base 99: mod_base = um
  modified_base 100: mod_base = OTHER; note = Phosphorothioate (PS) linkage
  modified_base 100: mod_base = um
  source 1..100: mol_type = other RNA

SEQ ID NO: 534 - RNA, 100 nt, synthetic construct; identical to SEQ ID NO: 505
  modified_base 1: mod_base = um
  modified_base 2: mod_base = OTHER; note = Phosphorothioate (PS) linkage
  modified_base 2: mod_base = um
  modified_base 3: mod_base = OTHER; note = Phosphorothioate (PS) linkage
  modified_base 3: mod_base = cm
  modified_base 4: mod_base = OTHER; note = Phosphorothioate (PS) linkage
  modified_base 29: mod_base = gm
  modified_base 30: mod_base = cm
  modified_base 31: mod_base = um
  modified_base 32: mod_base = OTHER; note = 2'-O-methyladenosine
  modified_base 33: mod_base = gm
  modified_base 34: mod_base = OTHER; note = 2'-O-methyladenosine
  modified_base 35: mod_base = OTHER; note = 2'-O-methyladenosine
  modified_base 36: mod_base = OTHER; note = 2'-O-methyladenosine
  modified_base 37: mod_base = um
  modified_base 38: mod_base = OTHER; note = 2'-O-methyladenosine
  modified_base 39: mod_base = gm
  modified_base 40: mod_base = cm
  modified_base 68: mod_base = OTHER; note = 2'-O-methyladenosine
  modified_base 69: mod_base = OTHER; note = 2'-O-methyladenosine
  modified_base 70: mod_base = cm
  modified_base 71: mod_base = um
  modified_base 72: mod_base = um
  modified_base 73: mod_base = gm
  modified_base 74: mod_base = OTHER; note = 2'-O-methyladenosine
  modified_base 75: mod_base = OTHER; note = 2'-O-methyladenosine
  modified_base 76: mod_base = OTHER; note = 2'-O-methyladenosine
  modified_base 77: mod_base = OTHER; note = 2'-O-methyladenosine
  modified_base 78: mod_base = OTHER; note = 2'-O-methyladenosine
  modified_base 79: mod_base = gm
  modified_base 80: mod_base = um
  modified_base 81: mod_base = gm
  modified_base 82: mod_base = gm
  modified_base 83: mod_base = cm
  modified_base 84: mod_base = OTHER; note = 2'-O-methyladenosine
  modified_base 85: mod_base = cm
  modified_base 86: mod_base = cm
  modified_base 87: mod_base = gm
  modified_base 88: mod_base = OTHER; note = 2'-O-methyladenosine
  modified_base 89: mod_base = gm
  modified_base 90: mod_base = um
  modified_base 91: mod_base = cm
  modified_base 92: mod_base = gm
  modified_base 93: mod_base = gm
  modified_base 94: mod_base = um
  modified_base 95: mod_base = gm
  modified_base 96: mod_base = cm
  modified_base 97: mod_base = um
  modified_base 98: mod_base = OTHER; note = Phosphorothioate (PS) linkage
  modified_base 98: mod_base = um
  modified_base 99: mod_base = OTHER; note = Phosphorothioate (PS) linkage
  modified_base 99: mod_base = um
  modified_base 100: mod_base = OTHER; note = Phosphorothioate (PS) linkage
  modified_base 100: mod_base = um
  source 1..100: mol_type = other RNA

SEQ ID NO: 535 - RNA, 100 nt, synthetic construct; identical to SEQ ID NO: 506
  modified_base 1: mod_base = gm
  modified_base 2: mod_base = OTHER; note = Phosphorothioate (PS) linkage
  modified_base 2: mod_base = um
  modified_base 3: mod_base = OTHER; note = Phosphorothioate (PS) linkage
  modified_base 3: mod_base = gm
  modified_base 4: mod_base = OTHER; note = Phosphorothioate (PS) linkage
  modified_base 29: mod_base = gm
  modified_base 30: mod_base = cm
  modified_base 31: mod_base = um
  modified_base 32: mod_base = OTHER; note = 2'-O-methyladenosine
  modified_base 33: mod_base = gm
  modified_base 34: mod_base = OTHER; note = 2'-O-methyladenosine
  modified_base 35: mod_base = OTHER; note = 2'-O-methyladenosine
  modified_base 36: mod_base = OTHER; note = 2'-O-methyladenosine
  modified_base 37: mod_base = um
  modified_base 38: mod_base = OTHER; note = 2'-O-methyladenosine
  modified_base 39: mod_base = gm
  modified_base 40: mod_base = cm
  modified_base 68: mod_base = OTHER; note = 2'-O-methyladenosine
  modified_base 69: mod_base = OTHER; note = 2'-O-methyladenosine
  modified_base 70: mod_base = cm
  modified_base 71: mod_base = um
  modified_base 72: mod_base = um
  modified_base 73: mod_base = gm
  modified_base 74: mod_base = OTHER; note = 2'-O-methyladenosine
  modified_base 75: mod_base = OTHER; note = 2'-O-methyladenosine
  modified_base 76: mod_base = OTHER; note = 2'-O-methyladenosine
  modified_base 77: mod_base = OTHER; note = 2'-O-methyladenosine
  modified_base 78: mod_base = OTHER; note = 2'-O-methyladenosine
  modified_base 79: mod_base = gm
  modified_base 80: mod_base = um
  modified_base 81: mod_base = gm
  modified_base 82: mod_base = gm
  modified_base 83: mod_base = cm
  modified_base 84: mod_base = OTHER; note = 2'-O-methyladenosine
  modified_base 85: mod_base = cm
  modified_base 86: mod_base = cm
  modified_base 87: mod_base = gm
  modified_base 88: mod_base = OTHER; note = 2'-O-methyladenosine
  modified_base 89: mod_base = gm
  modified_base 90: mod_base = um
  modified_base 91: mod_base = cm
  modified_base 92: mod_base = gm
  modified_base 93: mod_base = gm
  modified_base 94: mod_base = um
  modified_base 95: mod_base = gm
  modified_base 96: mod_base = cm
  modified_base 97: mod_base = um
  modified_base 98: mod_base = OTHER; note = Phosphorothioate (PS) linkage
  modified_base 98: mod_base = um
  modified_base 99: mod_base = OTHER; note = Phosphorothioate (PS) linkage
  modified_base 99: mod_base = um
  modified_base 100: mod_base = OTHER; note = Phosphorothioate (PS) linkage
  modified_base 100: mod_base = um
  source 1..100: mol_type = other RNA

SEQ ID NO: 536 - RNA, 100 nt, synthetic construct; identical to SEQ ID NO: 507
  modified_base 1: mod_base = um
  modified_base 2: mod_base = OTHER; note = Phosphorothioate (PS) linkage
  modified_base 2: mod_base = OTHER; note = 2'-O-methyladenosine
  modified_base 3: mod_base = OTHER; note = Phosphorothioate (PS) linkage
  modified_base 3: mod_base = OTHER; note = 2'-O-methyladenosine
  modified_base 4: mod_base = OTHER; note = Phosphorothioate (PS) linkage
  modified_base 29: mod_base = gm
  modified_base 30: mod_base = cm
  modified_base 31: mod_base = um
  modified_base 32: mod_base = OTHER; note = 2'-O-methyladenosine
  modified_base 33: mod_base = gm
  modified_base 34: mod_base = OTHER; note = 2'-O-methyladenosine
  modified_base 35: mod_base = OTHER; note = 2'-O-methyladenosine
  modified_base 36: mod_base = OTHER; note = 2'-O-methyladenosine
  modified_base 37: mod_base = um
  modified_base 38: mod_base = OTHER; note = 2'-O-methyladenosine
  modified_base 39: mod_base = gm
  modified_base 40: mod_base = cm
  modified_base 68: mod_base = OTHER; note = 2'-O-methyladenosine
  modified_base 69: mod_base = OTHER; note = 2'-O-methyladenosine
  modified_base 70: mod_base = cm
  modified_base 71: mod_base = um
  modified_base 72: mod_base = um
  modified_base 73: mod_base = gm
  modified_base 74: mod_base = OTHER; note = 2'-O-methyladenosine
  modified_base 75: mod_base = OTHER; note = 2'-O-methyladenosine
  modified_base 76: mod_base = OTHER; note = 2'-O-methyladenosine
  modified_base 77: mod_base = OTHER; note = 2'-O-methyladenosine
  modified_base 78: mod_base = OTHER; note = 2'-O-methyladenosine
  modified_base 79: mod_base = gm
  modified_base 80: mod_base = um
  modified_base 81: mod_base = gm
  modified_base 82: mod_base = gm
  modified_base 83: mod_base = cm
  modified_base 84: mod_base = OTHER; note = 2'-O-methyladenosine
  modified_base 85: mod_base = cm
  modified_base 86: mod_base = cm
  modified_base 87: mod_base = gm
  modified_base 88: mod_base = OTHER; note = 2'-O-methyladenosine
  modified_base 89: mod_base = gm
  modified_base 90: mod_base = um
  modified_base 91: mod_base = cm
  modified_base 92: mod_base = gm
  modified_base 93: mod_base = gm
  modified_base 94: mod_base = um
  modified_base 95: mod_base = gm
  modified_base 96: mod_base = cm
  modified_base 97: mod_base = um
  modified_base 98: mod_base = OTHER; note = Phosphorothioate (PS) linkage
  modified_base 98: mod_base = um
  modified_base 99: mod_base = OTHER; note = Phosphorothioate (PS) linkage
  modified_base 99: mod_base = um
  modified_base 100: mod_base = OTHER; note = Phosphorothioate (PS) linkage
  modified_base 100: mod_base = um
  source 1..100: mol_type = other RNA

SEQ ID NO: 537 - RNA, 100 nt, synthetic construct; identical to SEQ ID NO: 508
  modified_base 1: mod_base = um
  modified_base 2: mod_base = OTHER; note = Phosphorothioate (PS) linkage
  modified_base 2: mod_base = um
  modified_base 3: mod_base = OTHER; note = Phosphorothioate (PS) linkage
  modified_base 3: mod_base = OTHER; note = 2'-O-methyladenosine
  modified_base 4: mod_base = OTHER; note = Phosphorothioate (PS) linkage
  modified_base 29: mod_base = gm
  modified_base 30: mod_base = cm
  modified_base 31: mod_base = um
  modified_base 32: mod_base = OTHER; note = 2'-O-methyladenosine
  modified_base 33: mod_base = gm
  modified_base 34: mod_base = OTHER; note = 2'-O-methyladenosine
  modified_base 35: mod_base = OTHER; note = 2'-O-methyladenosine
  modified_base 36: mod_base = OTHER; note = 2'-O-methyladenosine
  modified_base 37: mod_base = um
  modified_base 38: mod_base = OTHER; note = 2'-O-methyladenosine
  modified_base 39: mod_base = gm
  modified_base 40: mod_base = cm
  modified_base 68: mod_base = OTHER; note = 2'-O-methyladenosine
  modified_base 69: mod_base = OTHER; note = 2'-O-methyladenosine
  modified_base 70: mod_base = cm
  modified_base 71: mod_base = um
  modified_base 72: mod_base = um
  modified_base 73: mod_base = gm
  modified_base 74: mod_base = OTHER; note = 2'-O-methyladenosine
  modified_base 75: mod_base = OTHER; note = 2'-O-methyladenosine
  modified_base 76: mod_base = OTHER; note = 2'-O-methyladenosine
  modified_base 77: mod_base = OTHER; note = 2'-O-methyladenosine
  modified_base 78: mod_base = OTHER; note = 2'-O-methyladenosine
  modified_base 79: mod_base = gm
  modified_base 80: mod_base = um
  modified_base 81: mod_base = gm
  modified_base 82: mod_base = gm
  modified_base 83: mod_base = cm
  modified_base 84: mod_base = OTHER; note = 2'-O-methyladenosine
  modified_base 85: mod_base = cm
  modified_base 86: mod_base = cm
  modified_base 87: mod_base = gm
  modified_base 88: mod_base = OTHER; note = 2'-O-methyladenosine
  modified_base 89: mod_base = gm
  modified_base 90: mod_base = um
  modified_base 91: mod_base = cm
  modified_base 92: mod_base = gm
  modified_base 93: mod_base = gm
  modified_base 94: mod_base = um
  modified_base 95: mod_base = gm
  modified_base 96: mod_base = cm
  modified_base 97: mod_base = um
  modified_base 98: mod_base = OTHER; note = Phosphorothioate (PS) linkage
  modified_base 98: mod_base = um
  modified_base 99: mod_base = OTHER; note = Phosphorothioate (PS) linkage
  modified_base 99: mod_base = um
  modified_base 100: mod_base = OTHER; note = Phosphorothioate (PS) linkage
  modified_base 100: mod_base = um
  source 1..100: mol_type = other RNA

SEQ ID NO: 538 - RNA, 100 nt, synthetic construct; identical to SEQ ID NO: 509
  modified_base 1: mod_base = gm
  modified_base 2: mod_base = OTHER; note = Phosphorothioate (PS) linkage
  modified_base 2: mod_base = gm
  modified_base 3: mod_base = OTHER; note = Phosphorothioate (PS) linkage
  modified_base 3: mod_base = gm
  modified_base 4: mod_base = OTHER; note = Phosphorothioate (PS) linkage
  modified_base 29: mod_base = gm
  modified_base 30: mod_base = cm
  modified_base 31: mod_base = um
  modified_base 32: mod_base = OTHER; note = 2'-O-methyladenosine
  modified_base 33: mod_base = gm
  modified_base 34: mod_base = OTHER; note = 2'-O-methyladenosine
  modified_base 35: mod_base = OTHER; note = 2'-O-methyladenosine
  modified_base 36: mod_base = OTHER; note = 2'-O-methyladenosine
  modified_base 37: mod_base = um
  modified_base 38: mod_base = OTHER; note = 2'-O-methyladenosine
  modified_base 39: mod_base = gm
  modified_base 40: mod_base = cm
  modified_base 68: mod_base = OTHER; note = 2'-O-methyladenosine
  modified_base 69: mod_base = OTHER; note = 2'-O-methyladenosine
  modified_base 70: mod_base = cm
  modified_base 71: mod_base = um
  modified_base 72: mod_base = um
  modified_base 73: mod_base = gm
  modified_base 74: mod_base = OTHER; note = 2'-O-methyladenosine
  modified_base 75: mod_base = OTHER; note = 2'-O-methyladenosine
  modified_base 76: mod_base = OTHER; note = 2'-O-methyladenosine
  modified_base 77: mod_base = OTHER; note = 2'-O-methyladenosine
  modified_base 78: mod_base = OTHER; note = 2'-O-methyladenosine
  modified_base 79: mod_base = gm
  modified_base 80: mod_base = um
  modified_base 81: mod_base = gm
  modified_base 82: mod_base = gm
  modified_base 83: mod_base = cm
  modified_base 84: mod_base = OTHER; note = 2'-O-methyladenosine
  modified_base 85: mod_base = cm
  modified_base 86: mod_base = cm
  modified_base 87: mod_base = gm
  modified_base 88: mod_base = OTHER; note = 2'-O-methyladenosine
  modified_base 89: mod_base = gm
  modified_base 90: mod_base = um
  modified_base 91: mod_base = cm
  modified_base 92: mod_base = gm
  modified_base 93: mod_base = gm
  modified_base 94: mod_base = um
  modified_base 95: mod_base = gm
  modified_base 96: mod_base = cm
  modified_base 97: mod_base = um
  modified_base 98: mod_base = OTHER; note = Phosphorothioate (PS) linkage
  modified_base 98: mod_base = um
  modified_base 99: mod_base = OTHER; note = Phosphorothioate (PS) linkage
  modified_base 99: mod_base = um
  modified_base 100: mod_base = OTHER; note = Phosphorothioate (PS) linkage
  modified_base 100: mod_base = um
  source 1..100: mol_type = other RNA

SEQ ID NO: 539 - RNA, 100 nt, synthetic construct; identical to SEQ ID NO: 510
  modified_base 1: mod_base = um
  modified_base 2: mod_base = OTHER; note = Phosphorothioate (PS) linkage
  modified_base 2: mod_base = gm
  modified_base 3: mod_base = OTHER; note = Phosphorothioate (PS) linkage
  modified_base 3: mod_base = um
  modified_base 4: mod_base = OTHER; note = Phosphorothioate (PS) linkage
  modified_base 29: mod_base = gm
  modified_base 30: mod_base = cm
  modified_base 31: mod_base = um
  modified_base 32: mod_base = OTHER; note = 2'-O-methyladenosine
  modified_base 33: mod_base = gm
  modified_base 34: mod_base = OTHER; note = 2'-O-methyladenosine
  modified_base 35: mod_base = OTHER; note = 2'-O-methyladenosine
  modified_base 36: mod_base = OTHER; note = 2'-O-methyladenosine
  modified_base 37: mod_base = um
  modified_base 38: mod_base = OTHER; note = 2'-O-methyladenosine
  modified_base 39: mod_base = gm
  modified_base 40: mod_base = cm
  modified_base 68: mod_base = OTHER; note = 2'-O-methyladenosine
  modified_base 69: mod_base = OTHER; note = 2'-O-methyladenosine
  modified_base 70: mod_base = cm
  modified_base 71: mod_base = um
  modified_base 72: mod_base = um
  modified_base 73: mod_base = gm
  modified_base 74: mod_base = OTHER; note = 2'-O-methyladenosine
  modified_base 75: mod_base = OTHER; note = 2'-O-methyladenosine
  modified_base 76: mod_base = OTHER; note = 2'-O-methyladenosine
  modified_base 77: mod_base = OTHER; note = 2'-O-methyladenosine
  modified_base 78: mod_base = OTHER; note = 2'-O-methyladenosine
  modified_base 79: mod_base = gm
  modified_base 80: mod_base = um
  modified_base 81: mod_base = gm
  modified_base 82: mod_base = gm
  modified_base 83: mod_base = cm
  modified_base 84: mod_base = OTHER; note = 2'-O-methyladenosine
  modified_base 85: mod_base = cm
  modified_base 86: mod_base = cm
  modified_base 87: mod_base = gm
  modified_base 88: mod_base = OTHER; note = 2'-O-methyladenosine
  modified_base 89: mod_base = gm
  modified_base 90: mod_base = um
  modified_base 91: mod_base = cm
  modified_base 92: mod_base = gm
  modified_base 93: mod_base = gm
  modified_base 94: mod_base = um
  modified_base 95: mod_base = gm
  modified_base 96: mod_base = cm
  modified_base 97: mod_base = um
  modified_base 98: mod_base = OTHER; note = Phosphorothioate (PS) linkage
  modified_base 98: mod_base = um
  modified_base 99: mod_base = OTHER; note = Phosphorothioate (PS) linkage
  modified_base 99: mod_base = um
  modified_base 100: mod_base = OTHER; note = Phosphorothioate (PS) linkage
  modified_base 100: mod_base = um
  source 1..100: mol_type = other RNA

SEQ ID NO: 540 - RNA, 100 nt, synthetic construct; identical to SEQ ID NO: 511
  modified_base 1: mod_base = um
  modified_base 2: mod_base = OTHER; note = Phosphorothioate (PS) linkage
  modified_base 2: mod_base = gm
  modified_base 3: mod_base = OTHER; note = Phosphorothioate (PS) linkage
  modified_base 3: mod_base = gm
  modified_base 4: mod_base = OTHER; note = Phosphorothioate (PS) linkage
  modified_base 29: mod_base = gm
  modified_base 30: mod_base = cm
  modified_base 31: mod_base = um
  modified_base 32: mod_base = OTHER; note = 2'-O-methyladenosine
  modified_base 33: mod_base = gm
  modified_base 34: mod_base = OTHER; note = 2'-O-methyladenosine
  modified_base 35: mod_base = OTHER; note = 2'-O-methyladenosine
  modified_base 36: mod_base = OTHER; note = 2'-O-methyladenosine
  modified_base 37: mod_base = um
  modified_base 38: mod_base = OTHER; note = 2'-O-methyladenosine
  modified_base 39: mod_base = gm
  modified_base 40: mod_base = cm
  modified_base 68: mod_base = OTHER; note = 2'-O-methyladenosine
  modified_base 69: mod_base = OTHER; note = 2'-O-methyladenosine
  modified_base 70: mod_base = cm
  modified_base 71: mod_base = um
  modified_base 72: mod_base = um
  modified_base 73: mod_base = gm
  modified_base 74: mod_base = OTHER; note = 2'-O-methyladenosine
  modified_base 75: mod_base = OTHER; note = 2'-O-methyladenosine
  modified_base 76: mod_base = OTHER; note = 2'-O-methyladenosine
  modified_base 77: mod_base = OTHER; note = 2'-O-methyladenosine
  modified_base 78: mod_base = OTHER; note = 2'-O-methyladenosine
  modified_base 79: mod_base = gm
  modified_base 80: mod_base = um
  modified_base 81: mod_base = gm
  modified_base 82: mod_base = gm
  modified_base 83: mod_base = cm
  modified_base 84: mod_base = OTHER; note = 2'-O-methyladenosine
  modified_base 85: mod_base = cm
  modified_base 86: mod_base = cm
  modified_base 87: mod_base = gm
  modified_base 88: mod_base = OTHER; note = 2'-O-methyladenosine
  modified_base 89: mod_base = gm
  modified_base 90: mod_base = um
  modified_base 91: mod_base = cm
  modified_base 92: mod_base = gm
  modified_base 93: mod_base = gm
  modified_base 94: mod_base = um
  modified_base 95: mod_base = gm
  modified_base 96: mod_base = cm
  modified_base 97: mod_base = um
  modified_base 98: mod_base = OTHER; note = Phosphorothioate (PS) linkage
  modified_base 98: mod_base = um
  modified_base 99: mod_base = OTHER; note = Phosphorothioate (PS) linkage
  modified_base 99: mod_base = um
  modified_base 100: mod_base = OTHER; note = Phosphorothioate (PS) linkage
  modified_base 100: mod_base = um
  source 1..100: mol_type = other RNA

SEQ ID NO: 541 - RNA, 100 nt, synthetic construct; identical to SEQ ID NO: 512
  modified_base 1: mod_base = um
  modified_base 2: mod_base = OTHER; note = Phosphorothioate (PS) linkage
  modified_base 2: mod_base = gm
  modified_base 3: mod_base = OTHER; note = Phosphorothioate (PS) linkage
  modified_base 3: mod_base = gm
  modified_base 4: mod_base = OTHER; note = Phosphorothioate (PS) linkage
  modified_base 29: mod_base = gm
  modified_base 30: mod_base = cm
  modified_base 31: mod_base = um
  modified_base 32: mod_base = OTHER; note = 2'-O-methyladenosine
  modified_base 33: mod_base = gm
  modified_base 34: mod_base = OTHER; note = 2'-O-methyladenosine
  modified_base 35: mod_base = OTHER; note = 2'-O-methyladenosine
  modified_base 36: mod_base = OTHER; note = 2'-O-methyladenosine
  modified_base 37: mod_base = um
  modified_base 38: mod_base = OTHER; note = 2'-O-methyladenosine
  modified_base 39: mod_base = gm
  modified_base 40: mod_base = cm
  modified_base 68: mod_base = OTHER; note = 2'-O-methyladenosine
  modified_base 69: mod_base = OTHER; note = 2'-O-methyladenosine
  modified_base 70: mod_base = cm
  modified_base 71: mod_base = um
  modified_base 72: mod_base = um
  modified_base 73: mod_base = gm
  modified_base 74: mod_base = OTHER; note = 2'-O-methyladenosine
  modified_base 75: mod_base = OTHER; note = 2'-O-methyladenosine
  modified_base 76: mod_base = OTHER; note = 2'-O-methyladenosine
  modified_base 77: mod_base = OTHER; note = 2'-O-methyladenosine
  modified_base 78: mod_base = OTHER; note = 2'-O-methyladenosine
  modified_base 79: mod_base = gm
  modified_base 80: mod_base = um
  modified_base 81: mod_base = gm
  modified_base 82: mod_base = gm
  modified_base 83: mod_base = cm
  modified_base 84: mod_base = OTHER; note = 2'-O-methyladenosine
  modified_base 85: mod_base = cm
  modified_base 86: mod_base = cm
  modified_base 87: mod_base = gm
  modified_base 88: mod_base = OTHER; note = 2'-O-methyladenosine
  modified_base 89: mod_base = gm
  modified_base 90: mod_base = um
  modified_base 91: mod_base = cm
  modified_base 92: mod_base = gm
  modified_base 93: mod_base = gm
  modified_base 94: mod_base = um
  modified_base 95: mod_base = gm
  modified_base 96: mod_base = cm
  modified_base 97: mod_base = um
  modified_base 98: mod_base = OTHER; note = Phosphorothioate (PS) linkage
  modified_base 98: mod_base = um
  modified_base 99: mod_base = OTHER; note = Phosphorothioate (PS) linkage
  modified_base 99: mod_base = um
  modified_base 100: mod_base = OTHER; note = Phosphorothioate (PS) linkage
  modified_base 100: mod_base = um
  source 1..100: mol_type = other RNA

SEQ ID NO: 542 - RNA, 100 nt, synthetic construct; identical to SEQ ID NO: 513
  modified_base 1: mod_base = OTHER; note = 2'-O-methyladenosine
  modified_base 2: mod_base = OTHER; note = Phosphorothioate (PS) linkage
  modified_base 2: mod_base = gm
  modified_base 3: mod_base = OTHER; note = Phosphorothioate (PS) linkage
  modified_base 3: mod_base = OTHER; note = 2'-O-methyladenosine
  modified_base 4: mod_base = OTHER; note = Phosphorothioate (PS) linkage
  modified_base 29: mod_base = gm
  modified_base 30: mod_base = cm
  modified_base 31: mod_base = um
  modified_base 32: mod_base = OTHER; note = 2'-O-methyladenosine
  modified_base 33: mod_base = gm
  modified_base 34: mod_base = OTHER; note = 2'-O-methyladenosine
  modified_base 35: mod_base = OTHER; note = 2'-O-methyladenosine
  modified_base 36: mod_base = OTHER; note = 2'-O-methyladenosine
  modified_base 37: mod_base = um
  modified_base 38: mod_base = OTHER; note = 2'-O-methyladenosine
  modified_base 39: mod_base = gm
  modified_base 40: mod_base = cm
  modified_base 68: mod_base = OTHER; note = 2'-O-methyladenosine
  modified_base 69: mod_base = OTHER; note = 2'-O-methyladenosine
  modified_base 70: mod_base = cm
  modified_base 71: mod_base = um
  modified_base 72: mod_base = um
  modified_base 73: mod_base = gm
  modified_base 74: mod_base = OTHER; note = 2'-O-methyladenosine
  modified_base 75: mod_base = OTHER; note = 2'-O-methyladenosine
  modified_base 76: mod_base = OTHER; note = 2'-O-methyladenosine
  modified_base 77: mod_base = OTHER; note = 2'-O-methyladenosine
  modified_base 78: mod_base = OTHER; note = 2'-O-methyladenosine
  modified_base 79: mod_base = gm
  modified_base 80: mod_base = um
  modified_base 81: mod_base = gm
  modified_base 82: mod_base = gm
  modified_base 83: mod_base = cm
  modified_base 84: mod_base = OTHER; note = 2'-O-methyladenosine
  modified_base 85: mod_base = cm
  modified_base 86: mod_base = cm
  modified_base 87: mod_base = gm
  modified_base 88: mod_base = OTHER; note = 2'-O-methyladenosine
  modified_base 89: mod_base = gm
  modified_base 90: mod_base = um
  modified_base 91: mod_base = cm
  modified_base 92: mod_base = gm
  modified_base 93: mod_base = gm
  modified_base 94: mod_base = um
  modified_base 95: mod_base = gm
  modified_base 96: mod_base = cm
  modified_base 97: mod_base = um
  modified_base 98: mod_base = OTHER; note = Phosphorothioate (PS) linkage
  modified_base 98: mod_base = um
  modified_base 99: mod_base = OTHER; note = Phosphorothioate (PS) linkage
  modified_base 99: mod_base = um
  modified_base 100: mod_base = OTHER; note = Phosphorothioate (PS) linkage
  modified_base 100: mod_base = um
  source 1..100: mol_type = other RNA

SEQ ID NO: 543 - RNA, 100 nt, synthetic construct; identical to SEQ ID NO: 514
  modified_base 1: mod_base = OTHER; note = 2'-O-methyladenosine
  modified_base 2: mod_base = OTHER; note = Phosphorothioate (PS) linkage
  modified_base 2: mod_base = gm
  modified_base 3: mod_base = OTHER; note = Phosphorothioate (PS) linkage
  modified_base 3: mod_base = um
  modified_base 4: mod_base = OTHER; note = Phosphorothioate (PS) linkage
  modified_base 29: mod_base = gm
  modified_base 30: mod_base = cm
  modified_base 31: mod_base = um
  modified_base 32: mod_base = OTHER; note = 2'-O-methyladenosine
  modified_base 33: mod_base = gm
  modified_base 34: mod_base = OTHER; note = 2'-O-methyladenosine
  modified_base 35: mod_base = OTHER; note = 2'-O-methyladenosine
  modified_base 36: mod_base = OTHER; note = 2'-O-methyladenosine
  modified_base 37: mod_base = um
  modified_base 38: mod_base = OTHER; note = 2'-O-methyladenosine
  modified_base 39: mod_base = gm
  modified_base 40: mod_base = cm
  modified_base 68: mod_base = OTHER; note = 2'-O-methyladenosine
  modified_base 69: mod_base = OTHER; note = 2'-O-methyladenosine
  modified_base 70: mod_base = cm
  modified_base 71: mod_base = um
  modified_base 72: mod_base = um
  modified_base 73: mod_base = gm
  modified_base 74: mod_base = OTHER; note = 2'-O-methyladenosine
  modified_base 75: mod_base = OTHER; note = 2'-O-methyladenosine
  modified_base 76: mod_base = OTHER; note = 2'-O-methyladenosine
  modified_base 77: mod_base = OTHER; note = 2'-O-methyladenosine
  modified_base 78: mod_base = OTHER; note = 2'-O-methyladenosine
  modified_base 79: mod_base = gm
  modified_base 80: mod_base = um
  modified_base 81: mod_base = gm
  modified_base 82: mod_base = gm
  modified_base 83: mod_base = cm
  modified_base 84: mod_base = OTHER; note = 2'-O-methyladenosine
  modified_base 85: mod_base = cm
  modified_base 86: mod_base = cm
  modified_base 87: mod_base = gm
  modified_base 88: mod_base = OTHER; note = 2'-O-methyladenosine
  modified_base 89: mod_base = gm
  modified_base 90: mod_base = um
  modified_base 91: mod_base = cm
  modified_base 92: mod_base = gm
  modified_base 93: mod_base = gm
  modified_base 94: mod_base = um
  modified_base 95: mod_base = gm
  modified_base 96: mod_base = cm
  modified_base 97: mod_base = um
  modified_base 98: mod_base = OTHER; note = Phosphorothioate (PS) linkage
  modified_base 98: mod_base = um
  modified_base 99: mod_base = OTHER; note = Phosphorothioate (PS) linkage
  modified_base 99: mod_base = um
  modified_base 100: mod_base = OTHER; note = Phosphorothioate (PS) linkage
  modified_base 100: mod_base = um
  source 1..100: mol_type = other RNA

SEQ ID NO: 544 - RNA, 100 nt, synthetic construct; identical to SEQ ID NO: 515
  modified_base 1: mod_base = cm
  modified_base 2: mod_base = OTHER; note = Phosphorothioate (PS) linkage
  modified_base 2: mod_base = cm
  modified_base 3: mod_base = OTHER; note = Phosphorothioate (PS) linkage
  modified_base 3: mod_base = um
  modified_base 4: mod_base = OTHER; note = Phosphorothioate (PS) linkage
  modified_base 29: mod_base = gm
  modified_base 30: mod_base = cm
  modified_base 31: mod_base = um
  modified_base 32: mod_base = OTHER; note = 2'-O-methyladenosine
  modified_base 33: mod_base = gm
  modified_base 34: mod_base = OTHER; note = 2'-O-methyladenosine
  modified_base 35: mod_base = OTHER; note = 2'-O-methyladenosine
  modified_base 36: mod_base = OTHER; note = 2'-O-methyladenosine
  modified_base 37: mod_base = um
  modified_base 38: mod_base = OTHER; note = 2'-O-methyladenosine
  modified_base 39: mod_base = gm
  modified_base 40: mod_base = cm
  modified_base 68: mod_base = OTHER; note = 2'-O-methyladenosine
  modified_base 69: mod_base = OTHER; note = 2'-O-methyladenosine
  modified_base 70: mod_base = cm
  modified_base 71: mod_base = um
  modified_base 72: mod_base = um
  modified_base 73: mod_base = gm
  modified_base 74: mod_base = OTHER; note = 2'-O-methyladenosine
  modified_base 75: mod_base = OTHER; note = 2'-O-methyladenosine
  modified_base 76: mod_base = OTHER; note = 2'-O-methyladenosine
  modified_base 77: mod_base = OTHER; note = 2'-O-methyladenosine
  modified_base 78: mod_base = OTHER; note = 2'-O-methyladenosine
  modified_base 79: mod_base = gm
  modified_base 80: mod_base = um
  modified_base 81: mod_base = gm
  modified_base 82: mod_base = gm
  modified_base 83: mod_base = cm
  modified_base 84: mod_base = OTHER; note = 2'-O-methyladenosine
  modified_base 85: mod_base = cm
  modified_base 86: mod_base = cm
  modified_base 87: mod_base = gm
  modified_base 88: mod_base = OTHER; note = 2'-O-methyladenosine
  modified_base 89: mod_base = gm
  modified_base 90: mod_base = um
  modified_base 91: mod_base = cm
  modified_base 92: mod_base = gm
  modified_base 93: mod_base = gm
  modified_base 94: mod_base = um
  modified_base 95: mod_base = gm
  modified_base 96: mod_base = cm
  modified_base 97: mod_base = um
  modified_base 98: mod_base = OTHER; note = Phosphorothioate (PS) linkage
  modified_base 98: mod_base = um
  modified_base 99: mod_base = OTHER; note = Phosphorothioate (PS) linkage
  modified_base 99: mod_base = um
  modified_base 100: mod_base = OTHER; note = Phosphorothioate (PS) linkage
  modified_base 100: mod_base = um
  source 1..100: mol_type = other RNA

SEQ ID NO: 545 - RNA, 100 nt, synthetic construct; identical to SEQ ID NO: 516
  modified_base 1: mod_base = um
  modified_base 2: mod_base = OTHER; note = Phosphorothioate (PS) linkage
  modified_base 2: mod_base = cm
  modified_base 3: mod_base = OTHER; note = Phosphorothioate (PS) linkage
  modified_base 3: mod_base = gm
  modified_base 4: mod_base = OTHER; note = Phosphorothioate (PS) linkage
  modified_base 29: mod_base = gm
  modified_base 30: mod_base = cm
  modified_base 31: mod_base = um
  modified_base 32: mod_base = OTHER; note = 2'-O-methyladenosine
  modified_base 33: mod_base = gm
  modified_base 34: mod_base = OTHER; note = 2'-O-methyladenosine
  modified_base 35: mod_base = OTHER; note = 2'-O-methyladenosine
  modified_base 36: mod_base = OTHER; note = 2'-O-methyladenosine
  modified_base 37: mod_base = um
  modified_base 38: mod_base = OTHER; note = 2'-O-methyladenosine
  modified_base 39: mod_base = gm
  modified_base 40: mod_base = cm
  modified_base 68: mod_base = OTHER; note = 2'-O-methyladenosine
  modified_base 69: mod_base = OTHER; note = 2'-O-methyladenosine
  modified_base 70: mod_base = cm
  modified_base 71: mod_base = um
  modified_base 72: mod_base = um
  modified_base 73: mod_base = gm
  modified_base 74: mod_base = OTHER; note = 2'-O-methyladenosine
  modified_base 75: mod_base = OTHER; note = 2'-O-methyladenosine
  modified_base 76: mod_base = OTHER; note = 2'-O-methyladenosine
  modified_base 77: mod_base = OTHER; note = 2'-O-methyladenosine
  modified_base 78: mod_base = OTHER; note = 2'-O-methyladenosine
  modified_base 79: mod_base = gm
  modified_base 80: mod_base = um
  modified_base 81: mod_base = gm
  modified_base 82: mod_base = gm
  modified_base 83: mod_base = cm
  modified_base 84: mod_base = OTHER; note = 2'-O-methyladenosine
  modified_base 85: mod_base = cm
  modified_base 86: mod_base = cm
  modified_base 87: mod_base = gm
  modified_base 88: mod_base = OTHER; note = 2'-O-methyladenosine
  modified_base 89: mod_base = gm
  modified_base 90: mod_base = um
  modified_base 91: mod_base = cm
  modified_base 92: mod_base = gm
  modified_base 93: mod_base = gm
  modified_base 94: mod_base = um
  modified_base 95: mod_base = gm
  modified_base 96: mod_base = cm
  modified_base 97: mod_base = um
  modified_base 98: mod_base = OTHER; note = Phosphorothioate (PS) linkage
  modified_base 98: mod_base = um
  modified_base 99: mod_base = OTHER; note = Phosphorothioate (PS) linkage
  modified_base 99: mod_base = um
  modified_base 100: mod_base = OTHER; note = Phosphorothioate (PS) linkage
  modified_base 100: mod_base = um
  source 1..100: mol_type = other RNA

SEQ ID NO: 546 - RNA, 100 nt, synthetic construct; identical to SEQ ID NO: 517
  modified_base 1: mod_base = gm
  modified_base 2: mod_base = OTHER; note = Phosphorothioate (PS) linkage
  modified_base 2: mod_base = OTHER; note = 2'-O-methyladenosine
  modified_base 3: mod_base = OTHER; note = Phosphorothioate (PS) linkage
  modified_base 3: mod_base = OTHER; note = 2'-O-methyladenosine
  modified_base 4: mod_base = OTHER; note = Phosphorothioate (PS) linkage
  modified_base 29: mod_base = gm
  modified_base 30: mod_base = cm
  modified_base 31: mod_base = um
  modified_base 32: mod_base = OTHER; note = 2'-O-methyladenosine
  modified_base 33: mod_base = gm
  modified_base 34: mod_base = OTHER; note = 2'-O-methyladenosine
  modified_base 35: mod_base = OTHER; note = 2'-O-methyladenosine
  modified_base 36: mod_base = OTHER; note = 2'-O-methyladenosine
  modified_base 37: mod_base = um
  modified_base 38: mod_base = OTHER; note = 2'-O-methyladenosine
  modified_base 39: mod_base = gm
  modified_base 40: mod_base = cm
  modified_base 68: mod_base = OTHER; note = 2'-O-methyladenosine
  modified_base 69: mod_base = OTHER; note = 2'-O-methyladenosine
  modified_base 70: mod_base = cm
  modified_base 71: mod_base = um
  modified_base 72: mod_base = um
  modified_base 73: mod_base = gm
  modified_base 74: mod_base = OTHER; note = 2'-O-methyladenosine
  modified_base 75: mod_base = OTHER; note = 2'-O-methyladenosine
  modified_base 76: mod_base = OTHER; note = 2'-O-methyladenosine
  modified_base 77: mod_base = OTHER; note = 2'-O-methyladenosine
  modified_base 78: mod_base = OTHER; note = 2'-O-methyladenosine
  modified_base 79: mod_base = gm
  modified_base 80: mod_base = um
  modified_base 81: mod_base = gm
  modified_base 82: mod_base = gm
  modified_base 83: mod_base = cm
  modified_base 84: mod_base = OTHER; note = 2'-O-methyladenosine
  modified_base 85: mod_base = cm
  modified_base 86: mod_base = cm
  modified_base 87: mod_base = gm
  modified_base 88: mod_base = OTHER; note = 2'-O-methyladenosine
  modified_base 89: mod_base = gm
  modified_base 90: mod_base = um
  modified_base 91: mod_base = cm
  modified_base 92: mod_base = gm
  modified_base 93: mod_base = gm
  modified_base 94: mod_base = um
  modified_base 95: mod_base = gm
  modified_base 96: mod_base = cm
  modified_base 97: mod_base = um
  modified_base 98: mod_base = OTHER; note = Phosphorothioate (PS) linkage
  modified_base 98: mod_base = um
  modified_base 99: mod_base = OTHER; note = Phosphorothioate (PS) linkage
  modified_base 99: mod_base = um
  modified_base 100: mod_base = OTHER; note = Phosphorothioate (PS) linkage
  modified_base 100: mod_base = um
  source 1..100: mol_type = other RNA

SEQ ID NO: 547 - RNA, 100 nt, synthetic construct; identical to SEQ ID NO: 518
  modified_base 1: mod_base = OTHER; note = 2'-O-methyladenosine
  modified_base 2: mod_base = OTHER; note = Phosphorothioate (PS) linkage
  modified_base 2: mod_base = cm
  modified_base 3: mod_base = OTHER; note = Phosphorothioate (PS) linkage
  modified_base 3: mod_base = cm
  modified_base 4: mod_base = OTHER; note = Phosphorothioate (PS) linkage
  modified_base 29: mod_base = gm
  modified_base 30: mod_base = cm
  modified_base 31: mod_base = um
  modified_base 32: mod_base = OTHER; note = 2'-O-methyladenosine
  modified_base 33: mod_base = gm
  modified_base 34: mod_base = OTHER; note = 2'-O-methyladenosine
  modified_base 35: mod_base = OTHER; note = 2'-O-methyladenosine
  modified_base 36: mod_base = OTHER; note = 2'-O-methyladenosine
  modified_base 37: mod_base = um
  modified_base 38: mod_base = OTHER; note = 2'-O-methyladenosine
  modified_base 39: mod_base = gm
  modified_base 40: mod_base = cm
  modified_base 68: mod_base = OTHER; note = 2'-O-methyladenosine
  modified_base 69: mod_base = OTHER; note = 2'-O-methyladenosine
  modified_base 70: mod_base = cm
  modified_base 71: mod_base = um
  modified_base 72: mod_base = um
  modified_base 73: mod_base = gm
  modified_base 74: mod_base = OTHER; note = 2'-O-methyladenosine
  modified_base 75: mod_base = OTHER; note = 2'-O-methyladenosine
  modified_base 76: mod_base = OTHER; note = 2'-O-methyladenosine
  modified_base 77: mod_base = OTHER; note = 2'-O-methyladenosine
  modified_base 78: mod_base = OTHER; note = 2'-O-methyladenosine
  modified_base 79: mod_base = gm
  modified_base 80: mod_base = um
  modified_base 81: mod_base = gm
  modified_base 82: mod_base = gm
  modified_base 83: mod_base = cm
  modified_base 84: mod_base = OTHER; note = 2'-O-methyladenosine
  modified_base 85: mod_base = cm
  modified_base 86: mod_base = cm
  modified_base 87: mod_base = gm
  modified_base 88: mod_base = OTHER; note = 2'-O-methyladenosine
  modified_base 89: mod_base = gm
  modified_base 90: mod_base = um
  modified_base 91: mod_base = cm
  modified_base 92: mod_base = gm
  modified_base 93: mod_base = gm
  modified_base 94: mod_base = um
  modified_base 95: mod_base = gm
  modified_base 96: mod_base = cm
  modified_base 97: mod_base = um
  modified_base 98: mod_base = OTHER; note = Phosphorothioate (PS) linkage
  modified_base 98: mod_base = um
  modified_base 99: mod_base = OTHER; note = Phosphorothioate (PS) linkage
  modified_base 99: mod_base = um
  modified_base 100: mod_base = OTHER; note = Phosphorothioate (PS) linkage
  modified_base 100: mod_base = um
  source 1..100: mol_type = other RNA

SEQ ID NO: 548 - RNA, 100 nt, synthetic construct; identical to SEQ ID NO: 519
  modified_base 1: mod_base = cm
  modified_base 2: mod_base = OTHER; note = Phosphorothioate (PS) linkage
  modified_base 2: mod_base = um
  modified_base 3: mod_base = OTHER; note = Phosphorothioate (PS) linkage
  modified_base 3: mod_base = um
  modified_base 4: mod_base = OTHER; note = Phosphorothioate (PS) linkage
  modified_base 29: mod_base = gm
  modified_base 30: mod_base = cm
  modified_base 31: mod_base = um
  modified_base 32: mod_base = OTHER; note = 2'-O-methyladenosine
  modified_base 33: mod_base = gm
  modified_base 34: mod_base = OTHER; note = 2'-O-methyladenosine
  modified_base 35: mod_base = OTHER; note = 2'-O-methyladenosine
  modified_base 36: mod_base = OTHER; note = 2'-O-methyladenosine
  modified_base 37: mod_base = um
  modified_base 38: mod_base = OTHER; note = 2'-O-methyladenosine
  modified_base 39: mod_base = gm
  modified_base 40: mod_base = cm
  modified_base 68: mod_base = OTHER; note = 2'-O-methyladenosine
  modified_base 69: mod_base = OTHER; note = 2'-O-methyladenosine
  modified_base 70: mod_base = cm
  modified_base 71: mod_base = um
  modified_base 72: mod_base = um
  modified_base 73: mod_base = gm
  modified_base 74: mod_base = OTHER; note = 2'-O-methyladenosine
  modified_base 75: mod_base = OTHER; note = 2'-O-methyladenosine
  modified_base 76: mod_base = OTHER; note = 2'-O-methyladenosine
  modified_base 77: mod_base = OTHER; note = 2'-O-methyladenosine
  modified_base 78: mod_base = OTHER; note = 2'-O-methyladenosine
  modified_base 79: mod_base = gm
  modified_base 80: mod_base = um
  modified_base 81: mod_base = gm
  modified_base 82: mod_base = gm
  modified_base 83: mod_base = cm
  modified_base 84: mod_base = OTHER; note = 2'-O-methyladenosine
  modified_base 85: mod_base = cm
  modified_base 86: mod_base = cm
  modified_base 87: mod_base = gm
  modified_base 88: mod_base = OTHER; note = 2'-O-methyladenosine
  modified_base 89: mod_base = gm
  modified_base 90: mod_base = um
  modified_base 91: mod_base = cm
  modified_base 92: mod_base = gm
  modified_base 93: mod_base = gm
  modified_base 94: mod_base = um
  modified_base 95: mod_base = gm
  modified_base 96: mod_base = cm
  modified_base 97: mod_base = um
  modified_base 98: mod_base = OTHER; note = Phosphorothioate (PS) linkage
  modified_base 98: mod_base = um
  modified_base 99: mod_base = OTHER; note = Phosphorothioate (PS) linkage
  modified_base 99: mod_base = um
  modified_base 100: mod_base = OTHER; note = Phosphorothioate (PS) linkage
  modified_base 100: mod_base = um
  source 1..100: mol_type = other RNA

SEQ ID NO: 549 - RNA, 100 nt, synthetic construct; identical to SEQ ID NO: 520
  modified_base 1: mod_base = gm
  modified_base 2: mod_base = OTHER; note = Phosphorothioate (PS) linkage
  modified_base 2: mod_base = um
  modified_base 3: mod_base = OTHER; note = Phosphorothioate (PS) linkage
  modified_base 3: mod_base = cm
  modified_base 4: mod_base = OTHER; note = Phosphorothioate (PS) linkage
  modified_base 29: mod_base = gm
  modified_base 30: mod_base = cm
  modified_base 31: mod_base = um
  modified_base 32: mod_base = OTHER; note = 2'-O-methyladenosine
  modified_base 33: mod_base = gm
  modified_base 34: mod_base = OTHER; note = 2'-O-methyladenosine
  modified_base 35: mod_base = OTHER; note = 2'-O-methyladenosine
  modified_base 36: mod_base = OTHER; note = 2'-O-methyladenosine
  modified_base 37: mod_base = um
  modified_base 38: mod_base = OTHER; note = 2'-O-methyladenosine
  modified_base 39: mod_base = gm
  modified_base 40: mod_base = cm
  modified_base 68: mod_base = OTHER; note = 2'-O-methyladenosine
  modified_base 69: mod_base = OTHER; note = 2'-O-methyladenosine
  modified_base 70: mod_base = cm
  modified_base 71: mod_base = um
  modified_base 72: mod_base = um
  modified_base 73: mod_base = gm
  modified_base 74: mod_base = OTHER; note = 2'-O-methyladenosine
  modified_base 75: mod_base = OTHER; note = 2'-O-methyladenosine
  modified_base 76: mod_base = OTHER; note = 2'-O-methyladenosine
  modified_base 77: mod_base = OTHER; note = 2'-O-methyladenosine
  modified_base 78: mod_base = OTHER; note = 2'-O-methyladenosine
  modified_base 79: mod_base = gm
  modified_base 80: mod_base = um
  modified_base 81: mod_base = gm
  modified_base 82: mod_base = gm
  modified_base 83: mod_base = cm
  modified_base 84: mod_base = OTHER; note = 2'-O-methyladenosine
  modified_base 85: mod_base = cm
  modified_base 86: mod_base = cm
  modified_base 87: mod_base = gm
  modified_base 88: mod_base = OTHER; note = 2'-O-methyladenosine
  modified_base 89: mod_base = gm
  modified_base 90: mod_base = um
  modified_base 91: mod_base = cm
  modified_base 92: mod_base = gm
  modified_base 93: mod_base = gm
  modified_base 94: mod_base = um
  modified_base 95: mod_base = gm
  modified_base 96: mod_base = cm
  modified_base 97: mod_base = um
  modified_base 98: mod_base = OTHER; note = Phosphorothioate (PS) linkage
  modified_base 98: mod_base = um
  modified_base 99: mod_base = OTHER; note = Phosphorothioate (PS) linkage
  modified_base 99: mod_base = um
  modified_base 100: mod_base = OTHER; note = Phosphorothioate (PS) linkage
  modified_base 100: mod_base = um
  source 1..100: mol_type = other RNA

SEQ ID NO: 550 - RNA, 100 nt, synthetic construct; identical to SEQ ID NO: 521
  modified_base 1: mod_base = OTHER; note = 2'-O-methyladenosine
  modified_base 2: mod_base = OTHER; note = Phosphorothioate (PS) linkage
  modified_base 2: mod_base = OTHER; note = 2'-O-methyladenosine
  modified_base 3: mod_base = OTHER; note = Phosphorothioate (PS) linkage
  modified_base 3: mod_base = OTHER; note = 2'-O-methyladenosine
  modified_base 4: mod_base = OTHER; note = Phosphorothioate (PS) linkage
  modified_base 29: mod_base = gm
  modified_base 30: mod_base = cm
  modified_base 31: mod_base = um
  modified_base 32: mod_base = OTHER; note = 2'-O-methyladenosine
  modified_base 33: mod_base = gm
  modified_base 34: mod_base = OTHER; note = 2'-O-methyladenosine
  modified_base 35: mod_base = OTHER; note = 2'-O-methyladenosine
  modified_base 36: mod_base = OTHER; note = 2'-O-methyladenosine
  modified_base 37: mod_base = um
  modified_base 38: mod_base = OTHER; note = 2'-O-methyladenosine
  modified_base 39: mod_base = gm
  modified_base 40: mod_base = cm
  modified_base 68: mod_base = OTHER; note = 2'-O-methyladenosine
  modified_base 69: mod_base = OTHER; note = 2'-O-methyladenosine
  modified_base 70: mod_base = cm
  modified_base 71: mod_base = um
  modified_base 72: mod_base = um
  modified_base 73: mod_base = gm
  modified_base 74: mod_base = OTHER; note = 2'-O-methyladenosine
  modified_base 75: mod_base = OTHER; note = 2'-O-methyladenosine
  modified_base 76: mod_base = OTHER; note = 2'-O-methyladenosine
  modified_base 77: mod_base = OTHER; note = 2'-O-methyladenosine
  modified_base 78: mod_base = OTHER; note = 2'-O-methyladenosine
  modified_base 79: mod_base = gm
  modified_base 80: mod_base = um
  modified_base 81: mod_base = gm
  modified_base 82: mod_base = gm
  modified_base 83: mod_base = cm
  modified_base 84: mod_base = OTHER; note = 2'-O-methyladenosine
  modified_base 85: mod_base = cm
  modified_base 86: mod_base = cm
  modified_base 87: mod_base = gm
  modified_base 88: mod_base = OTHER; note = 2'-O-methyladenosine
  modified_base 89: mod_base = gm
  modified_base 90: mod_base = um
  modified_base 91: mod_base = cm
  modified_base 92: mod_base = gm
  modified_base 93: mod_base = gm
  modified_base 94: mod_base = um
  modified_base 95: mod_base = gm
  modified_base 96: mod_base = cm
  modified_base 97: mod_base = um
  modified_base 98: mod_base = OTHER; note = Phosphorothioate (PS) linkage
  modified_base 98: mod_base = um
  modified_base 99: mod_base = OTHER; note = Phosphorothioate (PS) linkage
  modified_base 99: mod_base = um
  modified_base 100: mod_base = OTHER; note = Phosphorothioate (PS) linkage
  modified_base 100: mod_base = um
  source 1..100: mol_type = other RNA

SEQ ID NO: 551 - RNA, 100 nt, synthetic construct; identical to SEQ ID NO: 522
  modified_base 1: mod_base = um
  modified_base 2: mod_base = OTHER; note = Phosphorothioate (PS) linkage
  modified_base 2: mod_base = gm
  modified_base 3: mod_base = OTHER; note = Phosphorothioate (PS) linkage
  modified_base 3: mod_base = um
  modified_base 4: mod_base = OTHER; note = Phosphorothioate (PS) linkage
  modified_base 29: mod_base = gm
  modified_base 30: mod_base = cm
  modified_base 31: mod_base = um
  modified_base 32: mod_base = OTHER; note = 2'-O-methyladenosine
  modified_base 33: mod_base = gm
  modified_base 34: mod_base = OTHER; note = 2'-O-methyladenosine
  modified_base 35: mod_base = OTHER; note = 2'-O-methyladenosine
  modified_base 36: mod_base = OTHER; note = 2'-O-methyladenosine
  modified_base 37: mod_base = um
  modified_base 38: mod_base = OTHER; note = 2'-O-methyladenosine
  modified_base 39: mod_base = gm
  modified_base 40: mod_base = cm
  modified_base 68: mod_base = OTHER; note = 2'-O-methyladenosine
  modified_base 69: mod_base = OTHER; note = 2'-O-methyladenosine
  modified_base 70: mod_base = cm
  modified_base 71: mod_base = um
  modified_base 72: mod_base = um
  modified_base 73: mod_base = gm
  modified_base 74: mod_base = OTHER; note = 2'-O-methyladenosine
  modified_base 75: mod_base = OTHER; note = 2'-O-methyladenosine
  modified_base 76: mod_base = OTHER; note = 2'-O-methyladenosine
  modified_base 77: mod_base = OTHER; note = 2'-O-methyladenosine
  modified_base 78: mod_base = OTHER; note = 2'-O-methyladenosine
  modified_base 79: mod_base = gm
  modified_base 80: mod_base = um
  modified_base 81: mod_base = gm
  modified_base 82: mod_base = gm
  modified_base 83: mod_base = cm
  modified_base 84: mod_base = OTHER; note = 2'-O-methyladenosine
  modified_base 85: mod_base = cm
  modified_base 86: mod_base = cm
  modified_base 87: mod_base = gm
  modified_base 88: mod_base = OTHER; note = 2'-O-methyladenosine
  modified_base 89: mod_base = gm
  modified_base 90: mod_base = um
  modified_base 91: mod_base = cm
  modified_base 92: mod_base = gm
  modified_base 93: mod_base = gm
  modified_base 94: mod_base = um
  modified_base 95: mod_base = gm
  modified_base 96: mod_base = cm
  modified_base 97: mod_base = um
  modified_base 98: mod_base = OTHER; note = Phosphorothioate (PS) linkage
  modified_base 98: mod_base = um
  modified_base 99: mod_base = OTHER; note = Phosphorothioate (PS) linkage
  modified_base 99: mod_base = um
  modified_base 100: mod_base = OTHER; note = Phosphorothioate (PS) linkage
  modified_base 100: mod_base = um
  source 1..100: mol_type = other RNA

SEQ ID NO: 552 - RNA, 100 nt, synthetic construct; identical to SEQ ID NO: 523
  modified_base 1: mod_base = OTHER; note = 2'-O-methyladenosine
  modified_base 2: mod_base = OTHER; note = Phosphorothioate (PS) linkage
  modified_base 2: mod_base = OTHER; note = 2'-O-methyladenosine
  modified_base 3: mod_base = OTHER; note = Phosphorothioate (PS) linkage
  modified_base 3: mod_base = OTHER; note = 2'-O-methyladenosine
  modified_base 4: mod_base = OTHER; note = Phosphorothioate (PS) linkage
  modified_base 29: mod_base = gm
  modified_base 30: mod_base = cm
  modified_base 31: mod_base = um
  modified_base 32: mod_base = OTHER; note = 2'-O-methyladenosine
  modified_base 33: mod_base = gm
  modified_base 34: mod_base = OTHER; note = 2'-O-methyladenosine
  modified_base 35: mod_base = OTHER; note = 2'-O-methyladenosine
  modified_base 36: mod_base = OTHER; note = 2'-O-methyladenosine
  modified_base 37: mod_base = um
  modified_base 38: mod_base = OTHER; note = 2'-O-methyladenosine
  modified_base 39: mod_base = gm
  modified_base 40: mod_base = cm
  modified_base 68: mod_base = OTHER; note = 2'-O-methyladenosine
  modified_base 69: mod_base = OTHER; note = 2'-O-methyladenosine
  modified_base 70: mod_base = cm
  modified_base 71: mod_base = um
  modified_base 72: mod_base = um
  modified_base 73: mod_base = gm
  modified_base 74: mod_base = OTHER; note = 2'-O-methyladenosine
  modified_base 75: mod_base = OTHER; note = 2'-O-methyladenosine
  modified_base 76: mod_base = OTHER; note = 2'-O-methyladenosine
  modified_base 77: mod_base = OTHER; note = 2'-O-methyladenosine
  modified_base 78: mod_base = OTHER; note = 2'-O-methyladenosine
  modified_base 79: mod_base = gm
  modified_base 80: mod_base = um
  modified_base 81: mod_base = gm
  modified_base 82: mod_base = gm
  modified_base 83: mod_base = cm
  modified_base 84: mod_base = OTHER; note = 2'-O-methyladenosine
  modified_base 85: mod_base = cm
  modified_base 86: mod_base = cm
  modified_base 87: mod_base = gm
  modified_base 88: mod_base = OTHER; note = 2'-O-methyladenosine
  modified_base 89: mod_base = gm
  modified_base 90: mod_base = um
  modified_base 91: mod_base = cm
  modified_base 92: mod_base = gm
  modified_base 93: mod_base = gm
  modified_base 94: mod_base = um
  modified_base 95: mod_base = gm
  modified_base 96: mod_base = cm
  modified_base 97: mod_base = um
  modified_base 98: mod_base = OTHER; note = Phosphorothioate (PS) linkage
  modified_base 98: mod_base = um
  modified_base 99: mod_base = OTHER; note = Phosphorothioate (PS) linkage
  modified_base 99: mod_base = um
  modified_base 100: mod_base = OTHER; note = Phosphorothioate (PS) linkage
  modified_base 100: mod_base = um
  source 1..100: mol_type = other RNA

SEQ ID NO: 553 - RNA, 100 nt, synthetic construct; identical to SEQ ID NO: 524
  modified_base 1: mod_base = OTHER; note = 2'-O-methyladenosine
  modified_base 2: mod_base = OTHER; note = Phosphorothioate (PS) linkage
  modified_base 2: mod_base = gm
  modified_base 3: mod_base = OTHER; note = Phosphorothioate (PS) linkage
  modified_base 3: mod_base = cm
  modified_base 4: mod_base = OTHER; note = Phosphorothioate (PS) linkage
  modified_base 29: mod_base = gm
  modified_base 30: mod_base = cm
  modified_base 31: mod_base = um
  modified_base 32: mod_base = OTHER; note = 2'-O-methyladenosine
  modified_base 33: mod_base = gm
  modified_base 34: mod_base = OTHER; note = 2'-O-methyladenosine
  modified_base 35: mod_base = OTHER; note = 2'-O-methyladenosine
  modified_base 36: mod_base = OTHER; note = 2'-O-methyladenosine
  modified_base 37: mod_base = um
  modified_base 38: mod_base = OTHER; note = 2'-O-methyladenosine
  modified_base 39: mod_base = gm
  modified_base 40: mod_base = cm
  modified_base 68: mod_base = OTHER; note = 2'-O-methyladenosine
  modified_base 69: mod_base = OTHER; note = 2'-O-methyladenosine
  modified_base 70: mod_base = cm
  modified_base 71: mod_base = um
  modified_base 72: mod_base = um
  modified_base 73: mod_base = gm
  modified_base 74: mod_base = OTHER; note = 2'-O-methyladenosine
  modified_base 75: mod_base = OTHER; note = 2'-O-methyladenosine
  modified_base 76: mod_base = OTHER; note = 2'-O-methyladenosine
  modified_base 77: mod_base = OTHER; note = 2'-O-methyladenosine
  modified_base 78: mod_base = OTHER; note = 2'-O-methyladenosine
  modified_base 79: mod_base = gm
  modified_base 80: mod_base = um
  modified_base 81: mod_base = gm
  modified_base 82: mod_base = gm
  modified_base 83: mod_base = cm
  modified_base 84: mod_base = OTHER; note = 2'-O-methyladenosine
  modified_base 85: mod_base = cm
  modified_base 86: mod_base = cm
  modified_base 87: mod_base = gm
  modified_base 88: mod_base = OTHER; note = 2'-O-methyladenosine
  modified_base 89: mod_base = gm
  modified_base 90: mod_base = um
  modified_base 91: mod_base = cm
  modified_base 92: mod_base = gm
  modified_base 93: mod_base = gm
  modified_base 94: mod_base = um
  modified_base 95: mod_base = gm
  modified_base 96: mod_base = cm
  modified_base 97: mod_base = um
  modified_base 98: mod_base = OTHER; note = Phosphorothioate (PS) linkage
  modified_base 98: mod_base = um
  modified_base 99: mod_base = OTHER; note = Phosphorothioate (PS) linkage
  modified_base 99: mod_base = um
  modified_base 100: mod_base = OTHER; note = Phosphorothioate (PS) linkage
  modified_base 100: mod_base = um
  source 1..100: mol_type = other RNA

SEQ ID NO: 554 - RNA, 100 nt, synthetic construct; identical to SEQ ID NO: 525
  modified_base 1: mod_base = gm
  modified_base 2: mod_base = OTHER; note = Phosphorothioate (PS) linkage
  modified_base 2: mod_base = um
  modified_base 3: mod_base = OTHER; note = Phosphorothioate (PS) linkage
  modified_base 3: mod_base = um
  modified_base 4: mod_base = OTHER; note = Phosphorothioate (PS) linkage
  modified_base 29: mod_base = gm
  modified_base 30: mod_base = cm
  modified_base 31: mod_base = um
  modified_base 32: mod_base = OTHER; note = 2'-O-methyladenosine
  modified_base 33: mod_base = gm
  modified_base 34: mod_base = OTHER; note = 2'-O-methyladenosine
  modified_base 35: mod_base = OTHER; note = 2'-O-methyladenosine
  modified_base 36: mod_base = OTHER; note = 2'-O-methyladenosine
  modified_base 37: mod_base = um
  modified_base 38: mod_base = OTHER; note = 2'-O-methyladenosine
  modified_base 39: mod_base = gm
  modified_base 40: mod_base = cm
  modified_base 68: mod_base = OTHER; note = 2'-O-methyladenosine
  modified_base 69: mod_base = OTHER; note = 2'-O-methyladenosine
  modified_base 70: mod_base = cm
  modified_base 71: mod_base = um
  modified_base 72: mod_base = um
  modified_base 73: mod_base = gm
  modified_base 74: mod_base = OTHER; note = 2'-O-methyladenosine
  modified_base 75: mod_base = OTHER; note = 2'-O-methyladenosine
  modified_base 76: mod_base = OTHER; note = 2'-O-methyladenosine
  modified_base 77: mod_base = OTHER; note = 2'-O-methyladenosine
  modified_base 78: mod_base = OTHER; note = 2'-O-methyladenosine
  modified_base 79: mod_base = gm
  modified_base 80: mod_base = um
  modified_base 81: mod_base = gm
  modified_base 82: mod_base = gm
  modified_base 83: mod_base = cm
  modified_base 84: mod_base = OTHER; note = 2'-O-methyladenosine
  modified_base 85: mod_base = cm
  modified_base 86: mod_base = cm
  modified_base 87: mod_base = gm
  modified_base 88: mod_base = OTHER; note = 2'-O-methyladenosine
  modified_base 89: mod_base = gm
  modified_base 90: mod_base = um
  modified_base 91: mod_base = cm
  modified_base 92: mod_base = gm
  modified_base 93: mod_base = gm
  modified_base 94: mod_base = um
  modified_base 95: mod_base = gm
  modified_base 96: mod_base = cm
  modified_base 97: mod_base = um
  modified_base 98: mod_base = OTHER; note = Phosphorothioate (PS) linkage
  modified_base 98: mod_base = um
  modified_base 99: mod_base = OTHER; note = Phosphorothioate (PS) linkage
  modified_base 99: mod_base = um
  modified_base 100: mod_base = OTHER; note = Phosphorothioate (PS) linkage
  modified_base 100: mod_base = um
  source 1..100: mol_type = other RNA

SEQ ID NO: 555 - RNA, 100 nt, synthetic construct; identical to SEQ ID NO: 526
  modified_base 1: mod_base = cm
  modified_base 2: mod_base = OTHER; note = Phosphorothioate (PS) linkage
  modified_base 2: mod_base = OTHER; note = 2'-O-methyladenosine
  modified_base 3: mod_base = OTHER; note = Phosphorothioate (PS) linkage
  modified_base 3: mod_base = gm
  modified_base 4: mod_base = OTHER; note = Phosphorothioate (PS) linkage
  modified_base 29: mod_base = gm
  modified_base 30: mod_base = cm
  modified_base 31: mod_base = um
  modified_base 32: mod_base = OTHER; note = 2'-O-methyladenosine
  modified_base 33: mod_base = gm
  modified_base 34: mod_base = OTHER; note = 2'-O-methyladenosine
  modified_base 35: mod_base = OTHER; note = 2'-O-methyladenosine
  modified_base 36: mod_base = OTHER; note = 2'-O-methyladenosine
  modified_base 37: mod_base = um
  modified_base 38: mod_base = OTHER; note = 2'-O-methyladenosine
  modified_base 39: mod_base = gm
  modified_base 40: mod_base = cm
  modified_base 68: mod_base = OTHER; note = 2'-O-methyladenosine
  modified_base 69: mod_base = OTHER; note = 2'-O-methyladenosine
  modified_base 70: mod_base = cm
  modified_base 71: mod_base = um
  modified_base 72: mod_base = um
  modified_base 73: mod_base = gm
  modified_base 74: mod_base = OTHER; note = 2'-O-methyladenosine
  modified_base 75: mod_base = OTHER; note = 2'-O-methyladenosine
  modified_base 76: mod_base = OTHER; note = 2'-O-methyladenosine
  modified_base 77: mod_base = OTHER; note = 2'-O-methyladenosine
  modified_base 78: mod_base = OTHER; note = 2'-O-methyladenosine
  modified_base 79: mod_base = gm
  modified_base 80: mod_base = um
  modified_base 81: mod_base = gm
  modified_base 82: mod_base = gm
  modified_base 83: mod_base = cm
  modified_base 84: mod_base = OTHER; note = 2'-O-methyladenosine
  modified_base 85: mod_base = cm
  modified_base 86: mod_base = cm
  modified_base 87: mod_base = gm
  modified_base 88: mod_base = OTHER; note = 2'-O-methyladenosine
  modified_base 89: mod_base = gm
  modified_base 90: mod_base = um
  modified_base 91: mod_base = cm
  modified_base 92: mod_base = gm
  modified_base 93: mod_base = gm
  modified_base 94: mod_base = um
  modified_base 95: mod_base = gm
  modified_base 96: mod_base = cm
  modified_base 97: mod_base = um
  modified_base 98: mod_base = OTHER; note = Phosphorothioate (PS) linkage
  modified_base 98: mod_base = um
  modified_base 99: mod_base = OTHER; note = Phosphorothioate (PS) linkage
  modified_base 99: mod_base = um
  modified_base 100: mod_base = OTHER; note = Phosphorothioate (PS) linkage
  modified_base 100: mod_base = um
  source 1..100: mol_type = other RNA

SEQ ID NO: 556 - RNA, 14 nt, synthetic construct
  modified_base 1: mod_base = gm
  modified_base 2: mod_base = um
  modified_base 3: mod_base = gm
  modified_base 4: mod_base = OTHER; note = 2'-O-methyladenosine
  modified_base 5: mod_base = OTHER; note = 2'-O-methyladenosine
  modified_base 6: mod_base = cm
  modified_base 7: mod_base = OTHER; note = 2'-O-methyladenosine
  modified_base 8: mod_base = cm
  modified_base 9: mod_base = cm
  modified_base 10: mod_base = cm
  modified_base 11: mod_base = cm
  modified_base 12: mod_base = um
  modified_base 13: mod_base = um
  modified_base 14: mod_base = gm
  source 1..14: mol_type = other RNA
gtgaacaccccttg

SEQ ID NO: 557 - RNA, 14 nt, synthetic construct
  source 1..14: mol_type = other RNA
gtgaacaccccttg

SEQ ID NO: 558 - RNA, 14 nt, synthetic construct
  modified_base 2: mod_base = um
  modified_base 4: mod_base = OTHER; note = 2'-O-methyladenosine
  modified_base 6: mod_base = cm
  modified_base 8: mod_base = cm
  modified_base 10: mod_base = cm
  modified_base 12: mod_base = um
  modified_base 14: mod_base = gm
  source 1..14: mol_type = other RNA
gtgaacaccccttg

SEQ ID NO: 559 - RNA, 14 nt, synthetic construct
  modified_base 3: mod_base = gm
  modified_base 6: mod_base = cm
  modified_base 9: mod_base = cm
  modified_base 12: mod_base = um
  source 1..14: mol_type = other RNA
gtgaacaccccttg

SEQ ID NO: 560 - RNA, 14 nt, synthetic construct
  modified_base 1: mod_base = OTHER; note = 2' fluoro modified base
  modified_base 2: mod_base = OTHER; note = 2' fluoro modified base
  modified_base 3: mod_base = OTHER; note = 2' fluoro modified base
  modified_base 4: mod_base = OTHER; note = 2' fluoro modified base
  modified_base 5: mod_base = OTHER; note = 2' fluoro modified base
  modified_base 6: mod_base = OTHER; note = 2' fluoro modified base
  modified_base 7: mod_base = OTHER; note = 2' fluoro modified base
  modified_base 8: mod_base = OTHER; note = 2' fluoro modified base
  modified_base 9: mod_base = OTHER; note = 2' fluoro modified base
  modified_base 10: mod_base = OTHER; note = 2' fluoro modified base
  modified_base 11: mod_base = OTHER; note = 2' fluoro modified base
  modified_base 12: mod_base = OTHER; note = 2' fluoro modified base
  modified_base 13: mod_base = OTHER; note = 2' fluoro modified base
  modified_base 14: mod_base = OTHER; note = 2' fluoro modified base
  source 1..14: mol_type = other RNA
gtgaacaccccttg

SEQ ID NO: 561 - RNA, 14 nt, synthetic construct
  modified_base 2: mod_base = OTHER; note = 2' fluoro modified base
  modified_base 4: mod_base = OTHER; note = 2' fluoro modified base
  modified_base 6: mod_base = OTHER; note = 2' fluoro modified base
  modified_base 8: mod_base = OTHER; note = 2' fluoro modified base
  modified_base 10: mod_base = OTHER; note = 2' fluoro modified base
  modified_base 12: mod_base = OTHER; note = 2' fluoro modified base
  modified_base 14: mod_base = OTHER; note = 2' fluoro modified base
  source 1..14: mol_type = other RNA
gtgaacaccccttg

SEQ ID NO: 562 - RNA, 14 nt, synthetic construct
  modified_base 3: mod_base = OTHER; note = 2' fluoro modified base
  modified_base 6: mod_base = OTHER; note = 2' fluoro modified base
  modified_base 9: mod_base = OTHER; note = 2' fluoro modified base
  modified_base 12: mod_base = OTHER; note = 2' fluoro modified base
  source 1..14: mol_type = other RNA
gtgaacaccccttg

SEQ ID NO: 563 - RNA, 127 nt, synthetic construct
  source 1..127: mol_type = other RNA
aaggctgtgctgaccatcgagtttttgtactctcaagaaattgcagaagctacaaagataaggcttcatgccgaaatcaacaccctgtcattttatggcagggtgtttctcgtcgatggtcagcaca

SEQ ID NO: 564 - RNA, 126 nt, synthetic construct
  source 1..126: mol_type = other RNA
aaggctgtgctgaccatcgagtttttgtactctcaagaaattgcagaagctacaaagataaggcttcatgccgaaatcaacaccctgtcattttatggcagggtgtttctcgtcgatggtcagcac

SEQ ID NO: 565 - RNA, 125 nt, synthetic construct
  source 1..125: mol_type = other RNA
aaggctgtgctgaccatcgagtttttgtactctcaagaaattgcagaagctacaaagataaggcttcatgccgaaatcaacaccctgtcattttatggcagggtgtttctcgtcgatggtcagca

SEQ ID NO: 566 - RNA, 124 nt, synthetic construct
  source 1..124: mol_type = other RNA
aaggctgtgctgaccatcgagtttttgtactctcaagaaattgcagaagctacaaagataaggcttcatgccgaaatcaacaccctgtcattttatggcagggtgtttctcgtcgatggtcagc

SEQ ID NO: 567 - RNA, 123 nt, synthetic construct
  source 1..123: mol_type = other RNA
aaggctgtgctgaccatcgagtttttgtactctcaagaaattgcagaagctacaaagataaggcttcatgccgaaatcaacaccctgtcattttatggcagggtgtttctcgtcgatggtcag

SEQ ID NO: 568 - RNA, 122 nt, synthetic construct
  source 1..122: mol_type = other RNA
aaggctgtgctgaccatcgagtttttgtactctcaagaaattgcagaagctacaaagataaggcttcatgccgaaatcaacaccctgtcattttatggcagggtgtttctcgtcgatggtca

SEQ ID NO: 569 - RNA, 129 nt, synthetic construct
  source 1..129: mol_type = other RNA
aaggctgtgctgaccatcgagtttttgtactctcaagaaattgcagaagctacaaagataaggcttcatgccgaaatcaacaccctgtcattttatggcagggtgtttttctcgtcgatggtcagcaca

SEQ ID NO: 570 - RNA, 128 nt, synthetic construct
  source 1..128: mol_type = other RNA
aaggctgtgctgaccatcgagtttttgtactctcaagaaattgcagaagctacaaagataaggcttcatgccgaaatcaacaccctgtcattttatggcagggtgtttttctcgtcgatggtcagcac

SEQ ID NO: 571 - RNA, 127 nt, synthetic construct
  source 1..127: mol_type = other RNA
aaggctgtgctgaccatcgagtttttgtactctcaagaaattgcagaagctacaaagataaggcttcatgccgaaatcaacaccctgtcattttatggcagggtgtttttctcgtcgatggtcagca

SEQ ID NO: 572 - RNA, 126 nt, synthetic construct
  source 1..126: mol_type = other RNA
aaggctgtgctgaccatcgagtttttgtactctcaagaaattgcagaagctacaaagataaggcttcatgccgaaatcaacaccctgtcattttatggcagggtgtttttctcgtcgatggtcagc

SEQ ID NO: 573 - RNA, 125 nt, synthetic construct
  source 1..125: mol_type = other RNA
aaggctgtgctgaccatcgagtttttgtactctcaagaaattgcagaagctacaaagataaggcttcatgccgaaatcaacaccctgtcattttatggcagggtgtttttctcgtcgatggtcag

SEQ ID NO: 574 - RNA, 124 nt, synthetic construct
  source 1..124: mol_type = other RNA
aaggctgtgctgaccatcgagtttttgtactctcaagaaattgcagaagctacaaagataaggcttcatgccgaaatcaacaccctgtcattttatggcagggtgtttttctcgtcgatggtca

SEQ ID NO: 575 - RNA, 131 nt, synthetic construct
  source 1..131: mol_type = other RNA
aaggctgtgctgaccatcgagtttttgtactctcaagaaattgcagaagctacaaagataaggcttcatgccgaaatcaacaccctgtcattttatggcagggtgttcctttctcgtcgatggtcagcaca

SEQ ID NO: 576 - RNA, 130 nt, synthetic construct
  source 1..130: mol_type = other RNA
aaggctgtgctgaccatcgagtttttgtactctcaagaaattgcagaagctacaaagataaggcttcatgccgaaatcaacaccctgtcattttatggcagggtgttcctttctcgtcgatggtcagcac

SEQ ID NO: 577 - RNA, 129 nt, synthetic construct
  source 1..129: mol_type = other RNA
aaggctgtgctgaccatcgagtttttgtactctcaagaaattgcagaagctacaaagataaggcttcatgccgaaatcaacaccctgtcattttatggcagggtgttcctttctcgtcgatggtcagca

SEQ ID NO: 578 - RNA, 128 nt, synthetic construct
  source 1..128: mol_type = other RNA
aaggctgtgctgaccatcgagtttttgtactctcaagaaattgcagaagctacaaagataaggcttcatgccgaaatcaacaccctgtcattttatggcagggtgttcctttctcgtcgatggtcagc

SEQ ID NO: 579 - RNA, 127 nt, synthetic construct
  source 1..127: mol_type = other RNA
aaggctgtgctgaccatcgagtttttgtactctcaagaaattgcagaagctacaaagataaggcttcatgccgaaatcaacaccctgtcattttatggcagggtgttcctttctcgtcgatggtcag

SEQ ID NO: 580 - RNA, 126 nt, synthetic construct
  source 1..126: mol_type = other RNA
aaggctgtgctgaccatcgagtttttgtactctcaagaaattgcagaagctacaaagataaggcttcatgccgaaatcaacaccctgtcattttatggcagggtgttcctttctcgtcgatggtca

SEQ ID NO: 581 - RNA, 133 nt, synthetic construct
  source 1..133: mol_type = other RNA
aaggctgtgctgaccatcgagtttttgtactctcaagaaattgcagaagctacaaagataaggcttcatgccgaaatcaacaccctgtcattttatggcagggtgtttccctttctcgtcgatggtcagcaca

SEQ ID NO: 582 - RNA, 132 nt, synthetic construct
  source 1..132: mol_type = other RNA
aaggctgtgctgaccatcgagtttttgtactctcaagaaattgcagaagctacaaagataaggcttcatgccgaaatcaacaccctgtcattttatggcagggtgtttccctttctcgtcgatggtcagcac

SEQ ID NO: 583 - RNA, 131 nt, synthetic construct
  source 1..131: mol_type = other RNA
aaggctgtgctgaccatcgagtttttgtactctcaagaaattgcagaagctacaaagataaggcttcatgccgaaatcaacaccctgtcattttatggcagggtgtttccctttctcgtcgatggtcagca

SEQ ID NO: 584 - RNA, 130 nt, synthetic construct
  source 1..130: mol_type = other RNA
aaggctgtgctgaccatcgagtttttgtactctcaagaaattgcagaagctacaaagataaggcttcatgccgaaatcaacaccctgtcattttatggcagggtgtttccctttctcgtcgatggtcagc

SEQ ID NO: 585 - RNA, 129 nt, synthetic construct
  source 1..129: mol_type = other RNA
aaggctgtgctgaccatcgagtttttgtactctcaagaaattgcagaagctacaaagataaggcttcatgccgaaatcaacaccctgtcattttatggcagggtgtttccctttctcgtcgatggtcag

SEQ ID NO: 586 - RNA, 128 nt, synthetic construct
  source 1..128: mol_type = other RNA
aaggctgtgctgaccatcgagtttttgtactctcaagaaattgcagaagctacaaagataaggcttcatgccgaaatcaacaccctgtcattttatggcagggtgtttccctttctcgtcgatggtca

SEQ ID NO: 587 - RNA, 135 nt, synthetic construct
  source 1..135: mol_type = other RNA
aaggctgtgctgaccatcgagtttttgtactctcaagaaattgcagaagctacaaagataaggcttcatgccgaaatcaacaccctgtcattttatggcagggtgttagtccctttctcgtcgatggtcagcaca

SEQ ID NO: 588 - RNA, 134 nt, synthetic construct
  source 1..134: mol_type = other RNA
aaggctgtgctgaccatcgagtttttgtactctcaagaaattgcagaagctacaaagataaggcttcatgccgaaatcaacaccctgtcattttatggcagggtgttagtccctttctcgtcgatggtcagcac

SEQ ID NO: 589 - RNA, 133 nt, synthetic construct
  source 1..133: mol_type = other RNA
aaggctgtgctgaccatcgagtttttgtactctcaagaaattgcagaagctacaaagataaggcttcatgccgaaatcaacaccctgtcattttatggcagggtgttagtccctttctcgtcgatggtcagca

SEQ ID NO: 590 - RNA, 132 nt, synthetic construct
  source 1..132: mol_type = other RNA
aaggctgtgctgaccatcgagtttttgtactctcaagaaattgcagaagctacaaagataaggcttcatgccgaaatcaacaccctgtcattttatggcagggtgttagtccctttctcgtcgatggtcagc

SEQ ID NO: 591 - RNA, 131 nt, synthetic construct
  source 1..131: mol_type = other RNA
aaggctgtgctgaccatcgagtttttgtactctcaagaaattgcagaagctacaaagataaggcttcatgccgaaatcaacaccctgtcattttatggcagggtgttagtccctttctcgtcgatggtcag

SEQ ID NO: 592 - RNA, 130 nt, synthetic construct
  source 1..130: mol_type = other RNA
aaggctgtgctgaccatcgagtttttgtactctcaagaaattgcagaagctacaaagataaggcttcatgccgaaatcaacaccctgtcattttatggcagggtgttagtccctttctcgtcgatggtca

SEQ ID NO: 593 - RNA, 112 nt, synthetic construct
  source 1..112: mol_type = other RNA
ctgtgctgaccatcgacaaggttttagagctagaaatagcaagttaaaataaggctagtccgttatcaacttgaaaaagtggcaccgagtcggtgctctcgtcgatggtcag

SEQ ID NO: 594 - RNA, 111 nt, synthetic construct
  source 1..111: mol_type = other RNA
ctgtgctgaccatcgacaaggttttagagctagaaatagcaagttaaaataaggctagtccgttatcaacttgaaaaagtggcaccgagtcggtgctctcgtcgatggtca

SEQ ID NO: 595 - RNA, 110 nt, synthetic construct
  source 1..110: mol_type = other RNA
ctgtgctgaccatcgacaaggttttagagctagaaatagcaagttaaaataaggctagtccgttatcaacttgaaaaagtggcaccgagtcggtgctctcgtcgatggtc

SEQ ID NO: 596 - RNA, 109 nt, synthetic construct
  source 1..109: mol_type = other RNA
ctgtgctgaccatcgacaaggttttagagctagaaatagcaagttaaaataaggctagtccgttatcaacttgaaaaagtggcaccgagtcggtgctctcgtcgatggt

SEQ ID NO: 597 - RNA, 108 nt, synthetic construct
  source 1..108: mol_type = other RNA
ctgtgctgaccatcgacaaggttttagagctagaaatagcaagttaaaataaggctagtccgttatcaacttgaaaaagtggcaccgagtcggtgctctcgtcgatgg

SEQ ID NO: 598 - RNA, 107 nt, synthetic construct
  source 1..107: mol_type = other RNA
ctgtgctgaccatcgacaaggttttagagctagaaatagcaagttaaaataaggctagtccgttatcaacttgaaaaagtggcaccgagtcggtgctctcgtcgatg

SEQ ID NO: 599 - RNA, 114 nt, synthetic construct
  source 1..114: mol_type = other RNA
ctgtgctgaccatcgacaaggttttagagctagaaatagcaagttaaaataaggctagtccgttatcaacttgaaaaagtggcaccgagtcggtgctttctcgtcgatggtcag

SEQ ID NO: 600 - RNA, 113 nt, synthetic construct
  source 1..113: mol_type = other RNA
ctgtgctgaccatcgacaaggttttagagctagaaatagcaagttaaaataaggctagtccgttatcaacttgaaaaagtggcaccgagtcggtgctttctcgtcgatggtca

SEQ ID NO: 601 - RNA, 112 nt, synthetic construct
  source 1..112: mol_type = other RNA
ctgtgctgaccatcgacaaggttttagagctagaaatagcaagttaaaataaggctagtccgttatcaacttgaaaaagtggcaccgagtcggtgctttctcgtcgatggtc

SEQ ID NO: 602 - RNA, 111 nt, synthetic construct
  source 1..111: mol_type = other RNA
ctgtgctgaccatcgacaaggttttagagctagaaatagcaagttaaaataaggctagtccgttatcaacttgaaaaagtggcaccgagtcggtgctttctcgtcgatggt

SEQ ID NO: 603 - RNA, 110 nt, synthetic construct
  source 1..110: mol_type = other RNA
ctgtgctgaccatcgacaaggttttagagctagaaatagcaagttaaaataaggctagtccgttatcaacttgaaaaagtggcaccgagtcggtgctttctcgtcgatgg

SEQ ID NO: 604 - RNA, 109 nt, synthetic construct
  source 1..109: mol_type = other RNA
ctgtgctgaccatcgacaaggttttagagctagaaatagcaagttaaaataaggctagtccgttatcaacttgaaaaagtggcaccgagtcggtgctttctcgtcgatg

SEQ ID NO: 605 - RNA, 116 nt, synthetic construct
  source 1..116: mol_type = other RNA
ctgtgctgaccatcgacaaggttttagagctagaaatagcaagttaaaataaggctagtccgttatcaacttgaaaaagtggcaccgagtcggtgccctttctcgtcgatggtcag

SEQ ID NO: 606 - RNA, 115 nt, synthetic construct
  source 1..115: mol_type = other RNA
ctgtgctgaccatcgacaaggttttagagctagaaatagcaagttaaaataaggctagtccgttatcaacttgaaaaagtggcaccgagtcggtgccctttctcgtcgatggtca

SEQ ID NO: 607 - RNA, 114 nt, synthetic construct
  source 1..114: mol_type = other RNA
ctgtgctgaccatcgacaaggttttagagctagaaatagcaagttaaaataaggctagtccgttatcaacttgaaaaagtggcaccgagtcggtgccctttctcgtcgatggtc

SEQ ID NO: 608 - RNA, 113 nt, synthetic construct
  source 1..113: mol_type = other RNA
ctgtgctgaccatcgacaaggttttagagctagaaatagcaagttaaaataaggctagtccgttatcaacttgaaaaagtggcaccgagtcggtgccctttctcgtcgatggt

SEQ ID NO: 609 - RNA, 112 nt, synthetic construct
  source 1..112: mol_type = other RNA
ctgtgctgaccatcgacaaggttttagagctagaaatagcaagttaaaataaggctagtccgttatcaacttgaaaaagtggcaccgagtcggtgccctttctcgtcgatgg

SEQ ID NO: 610 - RNA, 111 nt, synthetic construct
  source 1..111: mol_type = other RNA
ctgtgctgaccatcgacaaggttttagagctagaaatagcaagttaaaataaggctagtccgttatcaacttgaaaaagtggcaccgagtcggtgccctttctcgtcgatg

SEQ ID NO: 611 - RNA, 118 nt, synthetic construct
  source 1..118: mol_type = other RNA
ctgtgctgaccatcgacaaggttttagagctagaaatagcaagttaaaataaggctagtccgttatcaacttgaaaaagtggcaccgagtcggtgctccctttctcgtcgatggtcag

SEQ ID NO: 612 - RNA, 117 nt, synthetic construct
  source 1..117: mol_type = other RNA
ctgtgctgaccatcgacaaggttttagagctagaaatagcaagttaaaataaggctagtccgttatcaacttgaaaaagtggcaccgagtcggtgctccctttctcgtcgatggtca

SEQ ID NO: 613 - RNA, 116 nt, synthetic construct
  source 1..116: mol_type = other RNA
ctgtgctgaccatcgacaaggttttagagctagaaatagcaagttaaaataaggctagtccgttatcaacttgaaaaagtggcaccgagtcggtgctccctttctcgtcgatggtc

SEQ ID NO: 614 - RNA, 115 nt, synthetic construct
  source 1..115: mol_type = other RNA
ctgtgctgaccatcgacaaggttttagagctagaaatagcaagttaaaataaggctagtccgttatcaacttgaaaaagtggcaccgagtcggtgctccctttctcgtcgatggt

SEQ ID NO: 615 - RNA, 114 nt, synthetic construct
  source 1..114: mol_type = other RNA
ctgtgctgaccatcgacaaggttttagagctagaaatagcaagttaaaataaggctagtccgttatcaacttgaaaaagtggcaccgagtcggtgctccctttctcgtcgatgg

SEQ ID NO: 616 - RNA, 113 nt, synthetic construct
  source 1..113: mol_type = other RNA
ctgtgctgaccatcgacaaggttttagagctagaaatagcaagttaaaataaggctagtccgttatcaacttgaaaaagtggcaccgagtcggtgctccctttctcgtcgatg

SEQ ID NO: 617 - RNA, 120 nt, synthetic construct
  source 1..120: mol_type = other RNA
ctgtgctgaccatcgacaaggttttagagctagaaatagcaagttaaaataaggctagtccgttatcaacttgaaaaagtggcaccgagtcggtgcagtccctttctcgtcgatggtcag

SEQ ID NO: 618 - RNA, 119 nt, synthetic construct
  source 1..119: mol_type = other RNA
ctgtgctgaccatcgacaaggttttagagctagaaatagcaagttaaaataaggctagtccgttatcaacttgaaaaagtggcaccgagtcggtgcagtccctttctcgtcgatggtca

SEQ ID NO: 619 - RNA, 118 nt, synthetic construct
  source 1..118: mol_type = other RNA
ctgtgctgaccatcgacaaggttttagagctagaaatagcaagttaaaataaggctagtccgttatcaacttgaaaaagtggcaccgagtcggtgcagtccctttctcgtcgatggtc

SEQ ID NO: 620 - RNA, 117 nt, synthetic construct
  source 1..117: mol_type = other RNA
ctgtgctgaccatcgacaaggttttagagctagaaatagcaagttaaaataaggctagtccgttatcaacttgaaaaagtggcaccgagtcggtgcagtccctttctcgtcgatggt

SEQ ID NO: 621 - RNA, 116 nt, synthetic construct
  source 1..116: mol_type = other RNA
ctgtgctgaccatcgacaaggttttagagctagaaatagcaagttaaaataaggctagtccgttatcaacttgaaaaagtggcaccgagtcggtgcagtccctttctcgtcgatgg

SEQ ID NO: 622 - RNA, 115 nt, synthetic construct
  source 1..115: mol_type = other RNA
ctgtgctgaccatcgacaaggttttagagctagaaatagcaagttaaaataaggctagtccgttatcaacttgaaaaagtggcaccgagtcggtgcagtccctttctcgtcgatg

SEQ ID NO: 623 - RNA, 127 nt, synthetic construct; identical to SEQ ID NO: 563
  modified_base 1: mod_base = OTHER; note = 2'-O-methyladenosine
  modified_base 2: mod_base = OTHER; note = Phosphorothioate (PS) linkage
  modified_base 2: mod_base = OTHER; note = 2'-O-methyladenosine
  modified_base 3: mod_base = OTHER; note = Phosphorothioate (PS) linkage
  modified_base 3: mod_base = gm
  modified_base 4: mod_base = OTHER; note = Phosphorothioate (PS) linkage
  modified_base 125: mod_base = OTHER; note = Phosphorothioate (PS) linkage
  modified_base 125: mod_base = OTHER; note = 2'-O-methyladenosine
  modified_base 126: mod_base = OTHER; note = Phosphorothioate (PS) linkage
  modified_base 126: mod_base = cm
  modified_base 127: mod_base = OTHER; note = Phosphorothioate (PS) linkage
  modified_base 127: mod_base = OTHER; note = 2'-O-methyladenosine
  source 1..127: mol_type = other RNA

SEQ ID NO: 624 - RNA, 126 nt, synthetic construct; identical to SEQ ID NO: 564
  modified_base 1: mod_base = OTHER; note = 2'-O-methyladenosine
  modified_base 2: mod_base = OTHER; note = Phosphorothioate (PS) linkage
  modified_base 2: mod_base = OTHER; note = 2'-O-methyladenosine
  modified_base 3: mod_base = OTHER; note = Phosphorothioate (PS) linkage
  modified_base 3: mod_base = gm
  modified_base 4: mod_base = OTHER; note = Phosphorothioate (PS) linkage
  modified_base 124: mod_base = OTHER; note = Phosphorothioate (PS) linkage
  modified_base 124: mod_base = cm
  modified_base 125: mod_base = OTHER; note = Phosphorothioate (PS) linkage
  modified_base 125: mod_base = OTHER; note = 2'-O-methyladenosine
  modified_base 126: mod_base = OTHER; note = Phosphorothioate (PS) linkage
  modified_base 126: mod_base = cm
  source 1..126: mol_type = other RNA

SEQ ID NO: 625 - RNA, 125 nt, synthetic construct; identical to SEQ ID NO: 565
  modified_base 1: mod_base = OTHER; note = 2'-O-methyladenosine
  modified_base 2: mod_base = OTHER; note = Phosphorothioate (PS) linkage
  modified_base 2: mod_base = OTHER; note = 2'-O-methyladenosine
  modified_base 3: mod_base = OTHER; note = Phosphorothioate (PS) linkage
  modified_base 3: mod_base = gm
  modified_base 4: mod_base = OTHER; note = Phosphorothioate (PS) linkage
  modified_base 123: mod_base = OTHER; note = Phosphorothioate (PS) linkage
  modified_base 123: mod_base = gm
  modified_base 124: mod_base = OTHER; note = Phosphorothioate (PS) linkage
  modified_base 124: mod_base = cm
  modified_base 125: mod_base = OTHER; note = Phosphorothioate (PS) linkage
  modified_base 125: mod_base = OTHER; note = 2'-O-methyladenosine
  source 1..125: mol_type = other RNA

SEQ ID NO: 626 - RNA, 124 nt, synthetic construct; identical to SEQ ID NO: 566
  modified_base 1: mod_base = OTHER; note = 2'-O-methyladenosine
  modified_base 2: mod_base = OTHER; note = Phosphorothioate (PS) linkage
  modified_base 2: mod_base = OTHER; note = 2'-O-methyladenosine
  modified_base 3: mod_base = OTHER; note = Phosphorothioate (PS) linkage
  modified_base 3: mod_base = gm
  modified_base 4: mod_base = OTHER; note = Phosphorothioate (PS) linkage
  modified_base 122: mod_base = OTHER; note = Phosphorothioate (PS) linkage
  modified_base 122: mod_base = OTHER; note = 2'-O-methyladenosine
  modified_base 123: mod_base = OTHER; note = Phosphorothioate (PS) linkage
  modified_base 123: mod_base = gm
  modified_base 124: mod_base = OTHER; note = Phosphorothioate (PS) linkage
  modified_base 124: mod_base = cm
  source 1..124: mol_type = other RNA

SEQ ID NO: 627 - RNA, 123 nt, synthetic construct; identical to SEQ ID NO: 567
  modified_base 1: mod_base = OTHER; note = 2'-O-methyladenosine
  modified_base 2: mod_base = OTHER; note = Phosphorothioate (PS) linkage
  modified_base 2: mod_base = OTHER; note = 2'-O-methyladenosine
  modified_base 3: mod_base = OTHER; note = Phosphorothioate (PS) linkage
  modified_base 3: mod_base = gm
  modified_base 4: mod_base = OTHER; note = Phosphorothioate (PS) linkage
  modified_base 121: mod_base = OTHER; note = Phosphorothioate (PS) linkage
  modified_base 121: mod_base = cm
  modified_base 122: mod_base = OTHER; note = Phosphorothioate (PS) linkage
  modified_base 122: mod_base = OTHER; note = 2'-O-methyladenosine
  modified_base 123: mod_base = OTHER; note = Phosphorothioate (PS) linkage
  modified_base 123: mod_base = gm
  source 1..123: mol_type = other RNA

SEQ ID NO: 628 - RNA, 122 nt, synthetic construct; identical to SEQ ID NO: 568
  modified_base 1: mod_base = OTHER; note = 2'-O-methyladenosine
  modified_base 2: mod_base = OTHER; note = Phosphorothioate (PS) linkage
  modified_base 2: mod_base = OTHER; note = 2'-O-methyladenosine
  modified_base 3: mod_base = OTHER; note = Phosphorothioate (PS) linkage
  modified_base 3: mod_base = gm
  modified_base 4: mod_base = OTHER; note = Phosphorothioate (PS) linkage
  modified_base 120: mod_base = OTHER; note = Phosphorothioate (PS) linkage
  modified_base 120: mod_base = um
  modified_base 121: mod_base = OTHER; note = Phosphorothioate (PS) linkage
  modified_base 121: mod_base = cm
  modified_base 122: mod_base = OTHER; note = Phosphorothioate (PS) linkage
  modified_base 122: mod_base = OTHER; note = 2'-O-methyladenosine
  source 1..122: mol_type = other RNA

SEQ ID NO: 629 - RNA, 129 nt, synthetic construct; identical to SEQ ID NO: 569
  modified_base 1: mod_base = OTHER; note = 2'-O-methyladenosine
  modified_base 2: mod_base = OTHER; note = Phosphorothioate (PS) linkage
  modified_base 2: mod_base = OTHER; note = 2'-O-methyladenosine
  modified_base 3: mod_base = OTHER; note = Phosphorothioate (PS) linkage
  modified_base 3: mod_base = gm
  modified_base 4: mod_base = OTHER; note = Phosphorothioate (PS) linkage
  modified_base 127: mod_base = OTHER; note = Phosphorothioate (PS) linkage
  modified_base 127: mod_base = OTHER; note = 2'-O-methyladenosine
  modified_base 128: mod_base = OTHER; note = Phosphorothioate (PS) linkage
  modified_base 128: mod_base = cm
  modified_base 129: mod_base = OTHER; note = Phosphorothioate (PS) linkage
  modified_base 129: mod_base = OTHER; note = 2'-O-methyladenosine
  source 1..129: mol_type = other RNA

SEQ ID NO: 630 - RNA, 128 nt, synthetic construct; identical to SEQ ID NO: 570
  modified_base 1: mod_base = OTHER; note = 2'-O-methyladenosine
  modified_base 2: mod_base = OTHER; note = Phosphorothioate (PS) linkage
  modified_base 2: mod_base = OTHER; note = 2'-O-methyladenosine
  modified_base 3: mod_base = OTHER; note = Phosphorothioate (PS) linkage
  modified_base 3: mod_base = gm
  modified_base 4: mod_base = OTHER; note = Phosphorothioate (PS) linkage
  modified_base 126: mod_base = OTHER; note = Phosphorothioate (PS) linkage
  modified_base 126: mod_base = cm
  modified_base 127: mod_base = OTHER; note = Phosphorothioate (PS) linkage
  modified_base 127: mod_base = OTHER; note = 2'-O-methyladenosine
  modified_base 128: mod_base = OTHER; note = Phosphorothioate (PS) linkage
  modified_base 128: mod_base = cm
  source 1..128: mol_type = other RNA

SEQ ID NO: 631 - RNA, 127 nt, synthetic construct; identical to SEQ ID NO: 571
  modified_base 1: mod_base = OTHER; note = 2'-O-methyladenosine
  modified_base 2: mod_base = OTHER; note = Phosphorothioate (PS) linkage
  modified_base 2: mod_base = OTHER; note = 2'-O-methyladenosine
  modified_base 3: mod_base = OTHER; note = Phosphorothioate (PS) linkage
  modified_base 3: mod_base = gm
  modified_base 4: mod_base = OTHER; note = Phosphorothioate (PS) linkage
  modified_base 125: mod_base = OTHER; note = Phosphorothioate (PS) linkage
  modified_base 125: mod_base = gm
  modified_base 126: mod_base = OTHER; note = Phosphorothioate (PS) linkage
  modified_base 126: mod_base = cm
  modified_base 127: mod_base = OTHER; note = Phosphorothioate (PS) linkage
  modified_base 127: mod_base = OTHER; note = 2'-O-methyladenosine
  source 1..127: mol_type = other RNA

SEQ ID NO: 632 - RNA, 126 nt, synthetic construct; identical to SEQ ID NO: 572
  modified_base 1: mod_base = OTHER; note = 2'-O-methyladenosine
  modified_base 2: mod_base = OTHER; note = Phosphorothioate (PS) linkage
  modified_base 2: mod_base = OTHER; note = 2'-O-methyladenosine
  modified_base 3: mod_base = OTHER; note = Phosphorothioate (PS) linkage
  modified_base 3: mod_base = gm
  modified_base 4: mod_base = OTHER; note = Phosphorothioate (PS) linkage
  modified_base 124: mod_base = OTHER; note = Phosphorothioate (PS) linkage
  modified_base 124: mod_base = OTHER; note = 2'-O-methyladenosine
  modified_base 125: mod_base = OTHER; note = Phosphorothioate (PS) linkage
  modified_base 125: mod_base = gm
  modified_base 126: mod_base = OTHER; note = Phosphorothioate (PS) linkage
  modified_base 126: mod_base = cm
  source 1..126: mol_type = other RNA

SEQ ID NO: 633 - RNA, 125 nt, synthetic construct; identical to SEQ ID NO: 573
  modified_base 1: mod_base = OTHER; note = 2'-O-methyladenosine
  modified_base 2: mod_base = OTHER; note = Phosphorothioate (PS) linkage
  modified_base 2: mod_base = OTHER; note = 2'-O-methyladenosine
  modified_base 3: mod_base = OTHER; note = Phosphorothioate (PS) linkage
  modified_base 3: mod_base = gm
  modified_base 4: mod_base = OTHER; note = Phosphorothioate (PS) linkage
  modified_base 123: mod_base = OTHER; note = Phosphorothioate (PS) linkage
  modified_base 123: mod_base = cm
  modified_base 124: mod_base = OTHER; note = Phosphorothioate (PS) linkage
  modified_base 124: mod_base = OTHER; note = 2'-O-methyladenosine
  modified_base 125: mod_base = OTHER; note = Phosphorothioate (PS) linkage
  modified_base 125: mod_base = gm
  source 1..125: mol_type = other RNA

SEQ ID NO: 634 - RNA, 124 nt, synthetic construct; identical to SEQ ID NO: 574
  modified_base 1: mod_base = OTHER; note = 2'-O-methyladenosine
  modified_base 2: mod_base = OTHER; note = Phosphorothioate (PS) linkage
  modified_base 2: mod_base = OTHER; note = 2'-O-methyladenosine
  modified_base 3: mod_base = OTHER; note = Phosphorothioate (PS) linkage
  modified_base 3: mod_base = gm
  modified_base 4: mod_base = OTHER; note = Phosphorothioate (PS) linkage
  modified_base 122: mod_base = OTHER; note = Phosphorothioate (PS) linkage
  modified_base 122: mod_base = um
  modified_base 123: mod_base = OTHER; note = Phosphorothioate (PS) linkage
  modified_base 123: mod_base = cm
  modified_base 124: mod_base = OTHER; note = Phosphorothioate (PS) linkage
  modified_base 124: mod_base = OTHER; note = 2'-O-methyladenosine
  source 1..124: mol_type = other RNA

SEQ ID NO: 635 - RNA, 131 nt, synthetic construct; identical to SEQ ID NO: 575
  modified_base 1: mod_base = OTHER; note = 2'-O-methyladenosine
  modified_base 2: mod_base = OTHER; note = Phosphorothioate (PS) linkage
  modified_base 2: mod_base = OTHER; note = 2'-O-methyladenosine
  modified_base 3: mod_base = OTHER; note = Phosphorothioate (PS) linkage
  modified_base 3: mod_base = gm
  modified_base 4: mod_base = OTHER; note = Phosphorothioate (PS) linkage
  modified_base 129: mod_base = OTHER; note = Phosphorothioate (PS) linkage
  modified_base 129: mod_base = OTHER; note = 2'-O-methyladenosine
  modified_base 130: mod_base = OTHER; note = Phosphorothioate (PS) linkage
  modified_base 130: mod_base = cm
  modified_base 131: mod_base = OTHER; note = Phosphorothioate (PS) linkage
  modified_base 131: mod_base = OTHER; note = 2'-O-methyladenosine
  source 1..131: mol_type = other RNA

SEQ ID NO: 636 - RNA, 130 nt, synthetic construct; identical to SEQ ID NO: 576
  modified_base 1: mod_base = OTHER; note = 2'-O-methyladenosine
  modified_base 2: mod_base = OTHER; note = Phosphorothioate (PS) linkage
  modified_base 2: mod_base = OTHER; note = 2'-O-methyladenosine
  modified_base 3: mod_base = OTHER; note = Phosphorothioate (PS) linkage
  modified_base 3: mod_base = gm
  modified_base 4: mod_base = OTHER; note = Phosphorothioate (PS) linkage
  modified_base 128: mod_base = OTHER; note = Phosphorothioate (PS) linkage
  modified_base 128: mod_base = cm
  modified_base 129: mod_base = OTHER; note = Phosphorothioate (PS) linkage
  modified_base 129: mod_base = OTHER; note = 2'-O-methyladenosine
  modified_base 130: mod_base = OTHER; note = Phosphorothioate (PS) linkage
  modified_base 130: mod_base = cm
  source 1..130: mol_type = other RNA

SEQ ID NO: 637 - RNA, 129 nt, synthetic construct; identical to SEQ ID NO: 577
  modified_base 1: mod_base = OTHER; note = 2'-O-methyladenosine
  modified_base 2: mod_base = OTHER; note = Phosphorothioate (PS) linkage
  modified_base 2: mod_base = OTHER; note = 2'-O-methyladenosine
  modified_base 3: mod_base = OTHER; note = Phosphorothioate (PS) linkage
  modified_base 3: mod_base = gm
  modified_base 4: mod_base = OTHER; note = Phosphorothioate (PS) linkage
  modified_base 127: mod_base = OTHER; note = Phosphorothioate (PS) linkage
  modified_base 127: mod_base = gm
  modified_base 128: mod_base = OTHER; note = Phosphorothioate (PS) linkage
  modified_base 128: mod_base = cm
  modified_base 129: mod_base = OTHER; note = Phosphorothioate (PS) linkage
  modified_base 129: mod_base = OTHER; note = 2'-O-methyladenosine
  source 1..129: mol_type = other RNA

SEQ ID NO: 638 - RNA, 128 nt, synthetic construct; identical to SEQ ID NO: 578
  modified_base 1: mod_base = OTHER; note = 2'-O-methyladenosine
  modified_base 2: mod_base = OTHER; note = Phosphorothioate (PS) linkage
  modified_base 2: mod_base = OTHER; note = 2'-O-methyladenosine
  modified_base 3: mod_base = OTHER; note = Phosphorothioate (PS) linkage
  modified_base 3: mod_base = gm
  modified_base 4: mod_base = OTHER; note = Phosphorothioate (PS) linkage
  modified_base 126: mod_base = OTHER; note = Phosphorothioate (PS) linkage
  modified_base 126: mod_base = OTHER; note = 2'-O-methyladenosine
  modified_base 127: mod_base = OTHER; note = Phosphorothioate (PS) linkage
  modified_base 127: mod_base = gm
  modified_base 128: mod_base = OTHER; note = Phosphorothioate (PS) linkage
  modified_base 128: mod_base = cm
  source 1..128: mol_type = other RNA

SEQ ID NO: 639 - RNA, 127 nt, synthetic construct; identical to SEQ ID NO: 579
  modified_base 1: mod_base = OTHER; note = 2'-O-methyladenosine
  modified_base 2: mod_base = OTHER; note = Phosphorothioate (PS) linkage
  modified_base 2: mod_base = OTHER; note = 2'-O-methyladenosine
  modified_base 3: mod_base = OTHER; note = Phosphorothioate (PS) linkage
  modified_base 3: mod_base = gm
  modified_base 4: mod_base = OTHER; note = Phosphorothioate (PS) linkage
  modified_base 125: mod_base = OTHER; note = Phosphorothioate (PS) linkage
  modified_base 125: mod_base = cm
  modified_base 126: mod_base = OTHER; note = Phosphorothioate (PS) linkage
  modified_base 126: mod_base = OTHER; note = 2'-O-methyladenosine
  modified_base 127: mod_base = OTHER; note = Phosphorothioate (PS) linkage
  modified_base 127: mod_base = gm
  source 1..127: mol_type = other RNA

SEQ ID NO: 640 - RNA, 126 nt, synthetic construct; identical to SEQ ID NO: 580
  modified_base 1: mod_base = OTHER; note = 2'-O-methyladenosine
  modified_base 2: mod_base = OTHER; note = Phosphorothioate (PS) linkage
  modified_base 2: mod_base = OTHER; note = 2'-O-methyladenosine
  modified_base 3: mod_base = OTHER; note = Phosphorothioate (PS) linkage
  modified_base 3: mod_base = gm
  modified_base 4: mod_base = OTHER; note = Phosphorothioate (PS) linkage
  modified_base 124: mod_base = OTHER; note = Phosphorothioate (PS) linkage
  modified_base 124: mod_base = um
  modified_base 125: mod_base = OTHER; note = Phosphorothioate (PS) linkage
  modified_base 125: mod_base = cm
  modified_base 126: mod_base = OTHER; note = Phosphorothioate (PS) linkage
  modified_base 126: mod_base = OTHER; note = 2'-O-methyladenosine
  source 1..126: mol_type = other RNA

SEQ ID NO: 641 - RNA, 133 nt, synthetic construct; identical to SEQ ID NO: 581
  modified_base 1: mod_base = OTHER; note = 2'-O-methyladenosine
  modified_base 2: mod_base = OTHER; note = Phosphorothioate (PS) linkage
  modified_base 2: mod_base = OTHER; note = 2'-O-methyladenosine
  modified_base 3: mod_base = OTHER; note = Phosphorothioate (PS) linkage
  modified_base 3: mod_base = gm
  modified_base 4: mod_base = OTHER; note = Phosphorothioate (PS) linkage
  modified_base 131: mod_base = OTHER; note = Phosphorothioate (PS) linkage
  modified_base 131: mod_base = OTHER; note = 2'-O-methyladenosine
  modified_base 132: mod_base = OTHER; note = Phosphorothioate (PS) linkage
  modified_base 132: mod_base = cm
  modified_base 133: mod_base = OTHER; note = Phosphorothioate (PS) linkage
  modified_base 133: mod_base = OTHER; note = 2'-O-methyladenosine
  source 1..133: mol_type = other RNA

SEQ ID NO: 642 - RNA, 132 nt, synthetic construct; identical to SEQ ID NO: 582
  modified_base 1: mod_base = OTHER; note = 2'-O-methyladenosine
  modified_base 2: mod_base = OTHER; note = Phosphorothioate (PS) linkage
  modified_base 2: mod_base = OTHER; note = 2'-O-methyladenosine
  modified_base 3: mod_base = OTHER; note = Phosphorothioate (PS) linkage
  modified_base 3: mod_base = gm
  modified_base 4: mod_base = OTHER; note = Phosphorothioate (PS) linkage
  modified_base 130: mod_base = OTHER; note = Phosphorothioate (PS) linkage
  modified_base 130: mod_base = cm
  modified_base 131: mod_base = OTHER; note = Phosphorothioate (PS) linkage
  modified_base 131: mod_base = OTHER; note = 2'-O-methyladenosine
  modified_base 132: mod_base = OTHER; note = Phosphorothioate (PS) linkage
  modified_base 132: mod_base = cm
  source 1..132: mol_type = other RNA

SEQ ID NO: 643 - RNA, 131 nt, synthetic construct; identical to SEQ ID NO: 583
  modified_base 1: mod_base = OTHER; note = 2'-O-methyladenosine
  modified_base 2: mod_base = OTHER; note = Phosphorothioate (PS) linkage
  modified_base 2: mod_base = OTHER; note = 2'-O-methyladenosine
  modified_base 3: mod_base = OTHER; note = Phosphorothioate (PS) linkage
  modified_base 3: mod_base = gm
  modified_base 4: mod_base = OTHER; note = Phosphorothioate (PS) linkage
  modified_base 129: mod_base = OTHER; note = Phosphorothioate (PS) linkage
  modified_base 129: mod_base = gm
  modified_base 130: mod_base = OTHER; note = Phosphorothioate (PS) linkage
  modified_base 130: mod_base = cm
  modified_base 131: mod_base = OTHER; note = Phosphorothioate (PS) linkage
  modified_base 131: mod_base = OTHER; note = 2'-O-methyladenosine
  source 1..131: mol_type = other RNA

SEQ ID NO: 644 - RNA, 130 nt, synthetic construct; identical to SEQ ID NO: 584
  modified_base 1: mod_base = OTHER; note = 2'-O-methyladenosine
  modified_base 2: mod_base = OTHER; note = Phosphorothioate (PS) linkage
  modified_base 2: mod_base = OTHER; note = 2'-O-methyladenosine
  modified_base 3: mod_base = OTHER; note = Phosphorothioate (PS) linkage
  modified_base 3: mod_base = gm
  modified_base 4: mod_base = OTHER; note = Phosphorothioate (PS) linkage
  modified_base 128: mod_base = OTHER; note = Phosphorothioate (PS) linkage
  modified_base 128: mod_base = OTHER; note = 2'-O-methyladenosine
  modified_base 129: mod_base = OTHER; note = Phosphorothioate (PS) linkage
  modified_base 129: mod_base = gm
  modified_base 130: mod_base = OTHER; note = Phosphorothioate (PS) linkage
  modified_base 130: mod_base = cm
  source 1..130: mol_type = other RNA

SEQ ID NO: 645 - RNA, 129 nt, synthetic construct; identical to SEQ ID NO: 585
  modified_base 1: mod_base = OTHER; note = 2'-O-methyladenosine
  modified_base 2: mod_base = OTHER; note = Phosphorothioate (PS) linkage
  modified_base 2: mod_base = OTHER; note = 2'-O-methyladenosine
  modified_base 3: mod_base = OTHER; note = Phosphorothioate (PS) linkage
  modified_base 3: mod_base = gm
  modified_base 4: mod_base = OTHER; note = Phosphorothioate (PS) linkage
  modified_base 127: mod_base = OTHER; note = Phosphorothioate (PS) linkage
  modified_base 127: mod_base = cm
  modified_base 128: mod_base = OTHER; note = Phosphorothioate (PS) linkage
  modified_base 128: mod_base = OTHER; note = 2'-O-methyladenosine
  modified_base 129: mod_base = OTHER; note = Phosphorothioate (PS) linkage
  modified_base 129: mod_base = gm
  source 1..129: mol_type = other RNA

SEQ ID NO: 646 - RNA, 128 nt, synthetic construct; identical to SEQ ID NO: 586
  modified_base 1: mod_base = OTHER; note = 2'-O-methyladenosine
  modified_base 2: mod_base = OTHER; note = Phosphorothioate (PS) linkage
  modified_base 2: mod_base = OTHER; note = 2'-O-methyladenosine
  modified_base 3: mod_base = OTHER; note = Phosphorothioate (PS) linkage
  modified_base 3: mod_base = gm
  modified_base 4: mod_base = OTHER; note = Phosphorothioate (PS) linkage
  modified_base 126: mod_base = OTHER; note = Phosphorothioate (PS) linkage
  modified_base 126: mod_base = um
  modified_base 127: mod_base = OTHER; note = Phosphorothioate (PS) linkage
  modified_base 127: mod_base = cm
  modified_base 128: mod_base = OTHER; note = Phosphorothioate (PS) linkage
  modified_base 128: mod_base = OTHER; note = 2'-O-methyladenosine
  source 1..128: mol_type = other RNA

SEQ ID NO: 647 - RNA, 135 nt, synthetic construct; identical to SEQ ID NO: 587
  modified_base 1: mod_base = OTHER; note = 2'-O-methyladenosine
  modified_base 2: mod_base = OTHER; note = Phosphorothioate (PS) linkage
  modified_base 2: mod_base = OTHER; note = 2'-O-methyladenosine
  modified_base 3: mod_base = OTHER; note = Phosphorothioate (PS) linkage
  modified_base 3: mod_base = gm
  modified_base 4: mod_base = OTHER; note = Phosphorothioate (PS) linkage
  modified_base 133: mod_base = OTHER; note = Phosphorothioate (PS) linkage
  modified_base 133: mod_base = OTHER; note = 2'-O-methyladenosine
  modified_base 134: mod_base = OTHER; note = Phosphorothioate (PS) linkage
  modified_base 134: mod_base = cm
  modified_base 135: mod_base = OTHER; note = Phosphorothioate (PS) linkage
  modified_base 135: mod_base = OTHER; note = 2'-O-methyladenosine
  source 1..135: mol_type = other RNA

SEQ ID NO: 648 - RNA, 134 nt, synthetic construct; identical to SEQ ID NO: 588
  modified_base 1: mod_base = OTHER; note = 2'-O-methyladenosine
  modified_base 2: mod_base = OTHER; note = Phosphorothioate (PS) linkage
  modified_base 2: mod_base = OTHER; note = 2'-O-methyladenosine
  modified_base 3: mod_base = OTHER; note = Phosphorothioate (PS) linkage
  modified_base 3: mod_base = gm
  modified_base 4: mod_base = OTHER; note = Phosphorothioate (PS) linkage
  modified_base 132: mod_base = OTHER; note = Phosphorothioate (PS) linkage
  modified_base 132: mod_base = cm
  modified_base 133: mod_base = OTHER; note = Phosphorothioate (PS) linkage
  modified_base 133: mod_base = OTHER; note = 2'-O-methyladenosine
  modified_base 134: mod_base = OTHER; note = Phosphorothioate (PS) linkage
  modified_base 134: mod_base = cm
  source 1..134: mol_type = other RNA

SEQ ID NO: 649 - RNA, 133 nt, synthetic construct; identical to SEQ ID NO: 589
  modified_base 1: mod_base = OTHER; note = 2'-O-methyladenosine
  modified_base 2: mod_base = OTHER; note = Phosphorothioate (PS) linkage
  modified_base 2: mod_base = OTHER; note = 2'-O-methyladenosine
  modified_base 3: mod_base = OTHER; note = Phosphorothioate (PS) linkage
  modified_base 3: mod_base = gm
  modified_base 4: mod_base = OTHER; note = Phosphorothioate (PS) linkage
  modified_base 131: mod_base = OTHER; note = Phosphorothioate (PS) linkage
  modified_base 131: mod_base = gm
  modified_base 132: mod_base = OTHER; note = Phosphorothioate (PS) linkage
  modified_base 132: mod_base = cm
  modified_base 133: mod_base = OTHER; note = Phosphorothioate (PS) linkage
  modified_base 133: mod_base = OTHER; note = 2'-O-methyladenosine
  source 1..133: mol_type = other RNA

SEQ ID NO: 650 - RNA, 132 nt, synthetic construct; identical to SEQ ID NO: 590
  modified_base 1: mod_base = OTHER; note = 2'-O-methyladenosine
  modified_base 2: mod_base = OTHER; note = Phosphorothioate (PS) linkage
  modified_base 2: mod_base = OTHER; note = 2'-O-methyladenosine
  modified_base 3: mod_base = OTHER; note = Phosphorothioate (PS) linkage
  modified_base 3: mod_base = gm
  modified_base 4: mod_base = OTHER; note = Phosphorothioate (PS) linkage
  modified_base 130: mod_base = OTHER; note = Phosphorothioate (PS) linkage
  modified_base 130: mod_base = OTHER; note = 2'-O-methyladenosine
  modified_base 131: mod_base = OTHER; note = Phosphorothioate (PS) linkage
  modified_base 131: mod_base = gm
  modified_base 132: mod_base = OTHER; note = Phosphorothioate (PS) linkage
  modified_base 132: mod_base = cm
  source 1..132: mol_type = other RNA

SEQ ID NO: 651 - RNA, 131 nt, synthetic construct; identical to SEQ ID NO: 591
  modified_base 1: mod_base = OTHER; note = 2'-O-methyladenosine
  modified_base 2: mod_base = OTHER; note = Phosphorothioate (PS) linkage
  modified_base 2: mod_base = OTHER; note = 2'-O-methyladenosine
  modified_base 3: mod_base = OTHER; note = Phosphorothioate (PS) linkage
  modified_base 3: mod_base = gm
  modified_base 4: mod_base = OTHER; note = Phosphorothioate (PS) linkage
  modified_base 129: mod_base = OTHER; note = Phosphorothioate (PS) linkage
  modified_base 129: mod_base = cm
  modified_base 130: mod_base = OTHER; note = Phosphorothioate (PS) linkage
  modified_base 130: mod_base = OTHER; note = 2'-O-methyladenosine
  modified_base 131: mod_base = OTHER; note = Phosphorothioate (PS) linkage
  modified_base 131: mod_base = gm
  source 1..131: mol_type = other RNA

SEQ ID NO: 652 - RNA, 130 nt, synthetic construct; identical to SEQ ID NO: 592
  modified_base 1: mod_base = OTHER; note = 2'-O-methyladenosine
  modified_base 2: mod_base = OTHER; note = Phosphorothioate (PS) linkage
  modified_base 2: mod_base = OTHER; note = 2'-O-methyladenosine
  modified_base 3: mod_base = OTHER; note = Phosphorothioate (PS) linkage
  modified_base 3: mod_base = gm
  modified_base 4: mod_base = OTHER; note = Phosphorothioate (PS) linkage
  modified_base 128: mod_base = OTHER; note = Phosphorothioate (PS) linkage
  modified_base 128: mod_base = um
  modified_base 129: mod_base = OTHER; note = Phosphorothioate (PS) linkage
  modified_base 129: mod_base = cm
  modified_base 130: mod_base = OTHER; note = Phosphorothioate (PS) linkage
  modified_base 130: mod_base = OTHER; note = 2'-O-methyladenosine
  source 1..130: mol_type = other RNA

SEQ ID NO: 653 - RNA, 112 nt, synthetic construct; identical to SEQ ID NO: 593
  modified_base 1: mod_base = cm
  modified_base 2: mod_base = OTHER; note = Phosphorothioate (PS) linkage
  modified_base 2: mod_base = um
  modified_base 3: mod_base = OTHER; note = Phosphorothioate (PS) linkage
  modified_base 3: mod_base = gm
  modified_base 4: mod_base = OTHER; note = Phosphorothioate (PS) linkage
  modified_base 110: mod_base = OTHER; note = Phosphorothioate (PS) linkage
  modified_base 110: mod_base = cm
  modified_base 111: mod_base = OTHER; note = Phosphorothioate (PS) linkage
  modified_base 111: mod_base = OTHER; note = 2'-O-methyladenosine
  modified_base 112: mod_base = OTHER; note = Phosphorothioate (PS) linkage
  modified_base 112: mod_base = gm
  source 1..112: mol_type = other RNA

SEQ ID NO: 654 - RNA, 111 nt, synthetic construct; identical to SEQ ID NO: 594
  modified_base 1: mod_base = cm
  modified_base 2: mod_base = OTHER; note = Phosphorothioate (PS) linkage
  modified_base 2: mod_base = um
  modified_base 3: mod_base = OTHER; note = Phosphorothioate (PS) linkage
  modified_base 3: mod_base = gm
  modified_base 4: mod_base = OTHER; note = Phosphorothioate (PS) linkage
  modified_base 109: mod_base = OTHER; note = Phosphorothioate (PS) linkage
  modified_base 109: mod_base = um
  modified_base 110: mod_base = OTHER; note = Phosphorothioate (PS) linkage
  modified_base 110: mod_base = cm
  modified_base 111: mod_base = OTHER; note = Phosphorothioate (PS) linkage
  modified_base 111: mod_base = OTHER; note = 2'-O-methyladenosine
  source 1..111: mol_type = other RNA

SEQ ID NO: 655 - RNA, 110 nt, synthetic construct; identical to SEQ ID NO: 595
  modified_base 1: mod_base = cm
  modified_base 2: mod_base = OTHER; note = Phosphorothioate (PS) linkage
  modified_base 2: mod_base = um
  modified_base 3: mod_base = OTHER; note = Phosphorothioate (PS) linkage
  modified_base 3: mod_base = gm
  modified_base 4: mod_base = OTHER; note = Phosphorothioate (PS) linkage
  modified_base 108: mod_base = OTHER; note = Phosphorothioate (PS) linkage
  modified_base 108: mod_base = gm
  modified_base 109: mod_base = OTHER; note = Phosphorothioate (PS) linkage
  modified_base 109: mod_base = um
  modified_base 110: mod_base = OTHER; note = Phosphorothioate (PS) linkage
  modified_base 110: mod_base = cm
  source 1..110: mol_type = other RNA

SEQ ID NO: 656 - RNA, 109 nt, synthetic construct; identical to SEQ ID NO: 596
  modified_base 1: mod_base = cm
  modified_base 2: mod_base = OTHER; note = Phosphorothioate (PS) linkage
  modified_base 2: mod_base = um
  modified_base 3: mod_base = OTHER; note = Phosphorothioate (PS) linkage
  modified_base 3: mod_base = gm
  modified_base 4: mod_base = OTHER; note = Phosphorothioate (PS) linkage
  modified_base 107: mod_base = OTHER; note = Phosphorothioate (PS) linkage
  modified_base 107: mod_base = gm
  modified_base 108: mod_base = OTHER; note = Phosphorothioate (PS) linkage
  modified_base 108: mod_base = gm
  modified_base 109: mod_base = OTHER; note = Phosphorothioate (PS) linkage
  modified_base 109: mod_base = um
  source 1..109: mol_type = other RNA

SEQ ID NO: 657 - RNA, 108 nt, synthetic construct; identical to SEQ ID NO: 597
  modified_base 1: mod_base = cm
  modified_base 2: mod_base = OTHER; note = Phosphorothioate (PS) linkage
  modified_base 2: mod_base = um
  modified_base 3: mod_base = OTHER; note = Phosphorothioate (PS) linkage
  modified_base 3: mod_base = gm
  modified_base 4: mod_base = OTHER; note = Phosphorothioate (PS) linkage
  modified_base 106: mod_base = OTHER; note = Phosphorothioate (PS) linkage
  modified_base 106: mod_base = um
  modified_base 107: mod_base = OTHER; note = Phosphorothioate (PS) linkage
  modified_base 107: mod_base = gm
  modified_base 108: mod_base = OTHER; note = Phosphorothioate (PS) linkage
  modified_base 108: mod_base = gm
  source 1..108: mol_type = other RNA

SEQ ID NO: 658 - RNA, 107 nt, synthetic construct; identical to SEQ ID NO: 598
  modified_base 1: mod_base = cm
  modified_base 2: mod_base = OTHER; note = Phosphorothioate (PS) linkage
  modified_base 2: mod_base = um
  modified_base 3: mod_base = OTHER; note = Phosphorothioate (PS) linkage
  modified_base 3: mod_base = gm
  modified_base 4: mod_base = OTHER; note = Phosphorothioate (PS) linkage
  modified_base 105: mod_base = OTHER; note = Phosphorothioate (PS) linkage
  modified_base 105: mod_base = OTHER; note = 2'-O-methyladenosine
  modified_base 106: mod_base = OTHER; note = Phosphorothioate (PS) linkage
  modified_base 106: mod_base = um
  modified_base 107: mod_base = OTHER; note = Phosphorothioate (PS) linkage
  modified_base 107: mod_base = gm
  source 1..107: mol_type = other RNA

SEQ ID NO: 659 - RNA, 114 nt, synthetic construct; identical to SEQ ID NO: 599
  modified_base 1: mod_base = cm
  modified_base 2: mod_base = OTHER; note = Phosphorothioate (PS) linkage
  modified_base 2: mod_base = um
  modified_base 3: mod_base = OTHER; note = Phosphorothioate (PS) linkage
  modified_base 3: mod_base = gm
  modified_base 4: mod_base = OTHER; note = Phosphorothioate (PS) linkage
  modified_base 112: mod_base = OTHER; note = Phosphorothioate (PS) linkage
  modified_base 112: mod_base = cm
  modified_base 113: mod_base = OTHER; note = Phosphorothioate (PS) linkage
  modified_base 113: mod_base = OTHER; note = 2'-O-methyladenosine
  modified_base 114: mod_base = OTHER; note = Phosphorothioate (PS) linkage
  modified_base 114: mod_base = gm
  source 1..114: mol_type = other RNA

SEQ ID NO: 660 - RNA, 113 nt, synthetic construct; identical to SEQ ID NO: 600
  modified_base 1: mod_base = cm
  modified_base 2: mod_base = OTHER; note = Phosphorothioate (PS) linkage
  modified_base 2: mod_base = um
  modified_base 3: mod_base = OTHER; note = Phosphorothioate (PS) linkage
  modified_base 3: mod_base = gm
  modified_base 4: mod_base = OTHER; note = Phosphorothioate (PS) linkage
  modified_base 111: mod_base = OTHER; note = Phosphorothioate (PS) linkage
  modified_base 111: mod_base = um
  modified_base 112: mod_base = OTHER; note = Phosphorothioate (PS) linkage
  modified_base 112: mod_base = cm
  modified_base 113: mod_base = OTHER; note = Phosphorothioate (PS) linkage
  modified_base 113: mod_base = OTHER; note = 2'-O-methyladenosine
  source 1..113: mol_type = other RNA

SEQ ID NO: 661 - RNA, 112 nt, synthetic construct; identical to SEQ ID NO: 601
  modified_base 1: mod_base = cm
  modified_base 2: mod_base = OTHER; note = Phosphorothioate (PS) linkage
  modified_base 2: mod_base = um
  modified_base 3: mod_base = OTHER; note = Phosphorothioate (PS) linkage
  modified_base 3: mod_base = gm
  modified_base 4: mod_base = OTHER; note = Phosphorothioate (PS) linkage
  modified_base 110: mod_base = OTHER; note = Phosphorothioate (PS) linkage
  modified_base 110: mod_base = gm
  modified_base 111: mod_base = OTHER; note = Phosphorothioate (PS) linkage
  modified_base 111: mod_base = um
  modified_base 112: mod_base = OTHER; note = Phosphorothioate (PS) linkage
  modified_base 112: mod_base = cm
  source 1..112: mol_type = other RNA

SEQ ID NO: 662 - RNA, 111 nt, synthetic construct; identical to SEQ ID NO: 602
  modified_base 1: mod_base = cm
  modified_base 2: mod_base = OTHER; note = Phosphorothioate (PS) linkage
  modified_base 2: mod_base = um
  modified_base 3: mod_base = OTHER; note = Phosphorothioate (PS) linkage
  modified_base 3: mod_base = gm
  modified_base 4: mod_base = OTHER; note = Phosphorothioate (PS) linkage
  modified_base 109: mod_base = OTHER; note = Phosphorothioate (PS) linkage
  modified_base 109: mod_base = gm
  modified_base 110: mod_base = OTHER; note = Phosphorothioate (PS) linkage
  modified_base 110: mod_base = gm
  modified_base 111: mod_base = OTHER; note = Phosphorothioate (PS) linkage
  modified_base 111: mod_base = um
  source 1..111: mol_type = other RNA

SEQ ID NO: 663 - RNA, 110 nt, synthetic construct; identical to SEQ ID NO: 603
  modified_base 1: mod_base = cm
  modified_base 2: mod_base = OTHER; note = Phosphorothioate (PS) linkage
  modified_base 2: mod_base = um
  modified_base 3: mod_base = OTHER; note = Phosphorothioate (PS) linkage
  modified_base 3: mod_base = gm
  modified_base 4: mod_base = OTHER; note = Phosphorothioate (PS) linkage
  modified_base 108: mod_base = OTHER; note = Phosphorothioate (PS) linkage
  modified_base 108: mod_base = um
  modified_base 109: mod_base = OTHER; note = Phosphorothioate (PS) linkage
  modified_base 109: mod_base = gm
  modified_base 110: mod_base = OTHER; note = Phosphorothioate (PS) linkage
  modified_base 110: mod_base = gm
  source 1..110: mol_type = other RNA

SEQ ID NO: 664 - RNA, 109 nt, synthetic construct; identical to SEQ ID NO: 604
  modified_base 1: mod_base = cm
  modified_base 2: mod_base = OTHER; note = Phosphorothioate (PS) linkage
  modified_base 2: mod_base = um
  modified_base 3: mod_base = OTHER; note = Phosphorothioate (PS) linkage
  modified_base 3: mod_base = gm
  modified_base 4: mod_base = OTHER; note = Phosphorothioate (PS) linkage
  modified_base 107: mod_base = OTHER; note = Phosphorothioate (PS) linkage
  modified_base 107: mod_base = OTHER; note = 2'-O-methyladenosine
  modified_base 108: mod_base = OTHER; note = Phosphorothioate (PS) linkage
  modified_base 108: mod_base = um
  modified_base 109: mod_base = OTHER; note = Phosphorothioate (PS) linkage
  modified_base 109: mod_base = gm
  source 1..109: mol_type = other RNA

SEQ ID NO: 665 - RNA, 116 nt, synthetic construct; identical to SEQ ID NO: 605
  modified_base 1: mod_base = cm
  modified_base 2: mod_base = OTHER; note = Phosphorothioate (PS) linkage
  modified_base 2: mod_base = um
  modified_base 3: mod_base = OTHER; note = Phosphorothioate (PS) linkage
  modified_base 3: mod_base = gm
  modified_base 4: mod_base = OTHER; note = Phosphorothioate (PS) linkage
  modified_base 114: mod_base = OTHER; note = Phosphorothioate (PS) linkage
  modified_base 114: mod_base = cm
  modified_base 115: mod_base = OTHER; note = Phosphorothioate (PS) linkage
  modified_base 115: mod_base = OTHER; note = 2'-O-methyladenosine
  modified_base 116: mod_base = OTHER; note = Phosphorothioate (PS) linkage
  modified_base 116: mod_base = gm
  source 1..116: mol_type = other RNA

SEQ ID NO: 666 - RNA, 115 nt, synthetic construct; identical to SEQ ID NO: 606
  modified_base 1: mod_base = cm
  modified_base 2: mod_base = OTHER; note = Phosphorothioate (PS) linkage
  modified_base 2: mod_base = um
  modified_base 3: mod_base = OTHER; note = Phosphorothioate (PS) linkage
  modified_base 3: mod_base = gm
  modified_base 4: mod_base = OTHER; note = Phosphorothioate (PS) linkage
  modified_base 113: mod_base = OTHER; note = Phosphorothioate (PS) linkage
  modified_base 113: mod_base = um
  modified_base 114: mod_base = OTHER; note = Phosphorothioate (PS) linkage
  modified_base 114: mod_base = cm
  modified_base 115: mod_base = OTHER; note = Phosphorothioate (PS) linkage
  modified_base 115: mod_base = OTHER; note = 2'-O-methyladenosine
  source 1..115: mol_type = other RNA

SEQ ID NO: 667 - RNA, 114 nt, synthetic construct; identical to SEQ ID NO: 607
  modified_base 1: mod_base = cm
  modified_base 2: mod_base = OTHER; note = Phosphorothioate (PS) linkage
  modified_base 2: mod_base = um
  modified_base 3: mod_base = OTHER; note = Phosphorothioate (PS) linkage
  modified_base 3: mod_base = gm
  modified_base 4: mod_base = OTHER; note = Phosphorothioate (PS) linkage
  modified_base 112: mod_base = OTHER; note = Phosphorothioate (PS) linkage
  modified_base 112: mod_base = gm
  modified_base 113: mod_base = OTHER; note = Phosphorothioate (PS) linkage
  modified_base 113: mod_base = um
  modified_base 114: mod_base = OTHER; note = Phosphorothioate (PS) linkage
  modified_base 114: mod_base = cm
  source 1..114: mol_type = other RNA

SEQ ID NO: 668 - RNA, 113 nt, synthetic construct; identical to SEQ ID NO: 608
  modified_base 1: mod_base = cm
  modified_base 2: mod_base = OTHER; note = Phosphorothioate (PS) linkage
  modified_base 2: mod_base = um
  modified_base 3: mod_base = OTHER; note = Phosphorothioate (PS) linkage
  modified_base 3: mod_base = gm
  modified_base 4: mod_base = OTHER; note = Phosphorothioate (PS) linkage
  modified_base 111: mod_base = OTHER; note = Phosphorothioate (PS) linkage
  modified_base 111: mod_base = gm
  modified_base 112: mod_base = OTHER; note = Phosphorothioate (PS) linkage
  modified_base 112: mod_base = gm
  modified_base 113: mod_base = OTHER; note = Phosphorothioate (PS) linkage
  modified_base 113: mod_base = um
  source 1..113: mol_type = other RNA

SEQ ID NO: 669 - RNA, 112 nt, synthetic construct; identical to SEQ ID NO: 609
  modified_base 1: mod_base = cm
  modified_base 2: mod_base = OTHER; note = Phosphorothioate (PS) linkage
  modified_base 2: mod_base = um
  modified_base 3: mod_base = OTHER; note = Phosphorothioate (PS) linkage
  modified_base 3: mod_base = gm
  modified_base 4: mod_base = OTHER; note = Phosphorothioate (PS) linkage
  modified_base 110: mod_base = OTHER; note = Phosphorothioate (PS) linkage
  modified_base 110: mod_base = um
  modified_base 111: mod_base = OTHER; note = Phosphorothioate (PS) linkage
  modified_base 111: mod_base = gm
  modified_base 112: mod_base = OTHER; note = Phosphorothioate (PS) linkage
  modified_base 112: mod_base = gm
  source 1..112: mol_type = other RNA

SEQ ID NO: 670 - RNA, 111 nt, synthetic construct; identical to SEQ ID NO: 610
  modified_base 1: mod_base = cm
  modified_base 2: mod_base = OTHER; note = Phosphorothioate (PS) linkage
  modified_base 2: mod_base = um
  modified_base 3: mod_base = OTHER; note = Phosphorothioate (PS) linkage
  modified_base 3: mod_base = gm
  modified_base 4: mod_base = OTHER; note = Phosphorothioate (PS) linkage
  modified_base 109: mod_base = OTHER; note = Phosphorothioate (PS) linkage
  modified_base 109: mod_base = OTHER; note = 2'-O-methyladenosine
  modified_base 110: mod_base = OTHER; note = Phosphorothioate (PS) linkage
  modified_base 110: mod_base = um
  modified_base 111: mod_base = OTHER; note = Phosphorothioate (PS) linkage
  modified_base 111: mod_base = gm
  source 1..111: mol_type = other RNA

SEQ ID NO: 671 - RNA, 118 nt, synthetic construct; identical to SEQ ID NO: 611
  modified_base 1: mod_base = cm
  modified_base 2: mod_base = OTHER; note = Phosphorothioate (PS) linkage
  modified_base 2: mod_base = um
  modified_base 3: mod_base = OTHER; note = Phosphorothioate (PS) linkage
  modified_base 3: mod_base = gm
  modified_base 4: mod_base = OTHER; note = Phosphorothioate (PS) linkage
  modified_base 116: mod_base = OTHER; note = Phosphorothioate (PS) linkage
  modified_base 116: mod_base = cm
  modified_base 117: mod_base = OTHER; note = Phosphorothioate (PS) linkage
  modified_base 117: mod_base = OTHER; note = 2'-O-methyladenosine
  modified_base 118: mod_base = OTHER; note = Phosphorothioate (PS) linkage
  modified_base 118: mod_base = gm
  source 1..118: mol_type = other RNA

SEQ ID NO: 672 - RNA, 117 nt, synthetic construct; identical to SEQ ID NO: 612
  modified_base 1: mod_base = cm
  modified_base 2: mod_base = OTHER; note = Phosphorothioate (PS) linkage
  modified_base 2: mod_base = um
  modified_base 3: mod_base = OTHER; note = Phosphorothioate (PS) linkage
  modified_base 3: mod_base = gm
  modified_base 4: mod_base = OTHER; note = Phosphorothioate (PS) linkage
  modified_base 115: mod_base = OTHER; note = Phosphorothioate (PS) linkage
  modified_base 115: mod_base = um
  modified_base 116: mod_base = OTHER; note = Phosphorothioate (PS) linkage
  modified_base 116: mod_base = cm
  modified_base 117: mod_base = OTHER; note = Phosphorothioate (PS) linkage
  modified_base 117: mod_base = OTHER; note = 2'-O-methyladenosine
  source 1..117: mol_type = other RNA

SEQ ID NO: 673 - RNA, 116 nt, synthetic construct; identical to SEQ ID NO: 613
  modified_base 1: mod_base = cm
  modified_base 2: mod_base = OTHER; note = Phosphorothioate (PS) linkage
  modified_base 2: mod_base = um
  modified_base 3: mod_base = OTHER; note = Phosphorothioate (PS) linkage
  modified_base 3: mod_base = gm
  modified_base 4: mod_base = OTHER; note = Phosphorothioate (PS) linkage
  modified_base 114: mod_base = OTHER; note = Phosphorothioate (PS) linkage
  modified_base 114: mod_base = gm
  modified_base 115: mod_base = OTHER; note = Phosphorothioate (PS) linkage
  modified_base 115: mod_base = um
  modified_base 116: mod_base = OTHER; note = Phosphorothioate (PS) linkage
  modified_base 116: mod_base = cm
  source 1..116: mol_type = other RNA

SEQ ID NO: 674 - RNA, 115 nt, synthetic construct; identical to SEQ ID NO: 614
  modified_base 1: mod_base = cm
  modified_base 2: mod_base = OTHER; note = Phosphorothioate (PS) linkage
  modified_base 2: mod_base = um
  modified_base 3: mod_base = OTHER; note = Phosphorothioate (PS) linkage
  modified_base 3: mod_base = gm
  modified_base 4: mod_base = OTHER; note = Phosphorothioate (PS) linkage
  modified_base 113: mod_base = OTHER; note = Phosphorothioate (PS) linkage
  modified_base 113: mod_base = gm
  modified_base 114: mod_base = OTHER; note = Phosphorothioate (PS) linkage
  modified_base 114: mod_base = gm
  modified_base 115: mod_base = OTHER; note = Phosphorothioate (PS) linkage
  modified_base 115: mod_base = um
  source 1..115: mol_type = other RNA

SEQ ID NO: 675 - RNA, 114 nt, synthetic construct; identical to SEQ ID NO: 615
  modified_base 1: mod_base = cm
  modified_base 2: mod_base = OTHER; note = Phosphorothioate (PS) linkage
  modified_base 2: mod_base = um
  modified_base 3: mod_base = OTHER; note = Phosphorothioate (PS) linkage
  modified_base 3: mod_base = gm
  modified_base 4: mod_base = OTHER; note = Phosphorothioate (PS) linkage
  modified_base 112: mod_base = OTHER; note = Phosphorothioate (PS) linkage
  modified_base 112: mod_base = um
  modified_base 113: mod_base = OTHER; note = Phosphorothioate (PS) linkage
  modified_base 113: mod_base = gm
  modified_base 114: mod_base = OTHER; note = Phosphorothioate (PS) linkage
  modified_base 114: mod_base = gm
  source 1..114: mol_type = other RNA

SEQ ID NO: 676 - RNA, 113 nt, synthetic construct; identical to SEQ ID NO: 616
  modified_base 1: mod_base = cm
  modified_base 2: mod_base = OTHER; note = Phosphorothioate (PS) linkage
  modified_base 2: mod_base = um
  modified_base 3: mod_base = OTHER; note = Phosphorothioate (PS) linkage
  modified_base 3: mod_base = gm
  modified_base 4: mod_base = OTHER; note = Phosphorothioate (PS) linkage
  modified_base 111: mod_base = OTHER; note = Phosphorothioate (PS) linkage
  modified_base 111: mod_base = OTHER; note = 2'-O-methyladenosine
  modified_base 112: mod_base = OTHER; note = Phosphorothioate (PS) linkage
  modified_base 112: mod_base = um
  modified_base 113: mod_base = OTHER; note = Phosphorothioate (PS) linkage
  modified_base 113: mod_base = gm
  source 1..113: mol_type = other RNA

SEQ ID NO: 677 - RNA, 120 nt, synthetic construct; identical to SEQ ID NO: 617
  modified_base 1: mod_base = cm
  modified_base 2: mod_base = OTHER; note = Phosphorothioate (PS) linkage
  modified_base 2: mod_base = um
  modified_base 3: mod_base = OTHER; note = Phosphorothioate (PS) linkage
  modified_base 3: mod_base = gm
  modified_base 4: mod_base = OTHER; note = Phosphorothioate (PS) linkage
  modified_base 118: mod_base = OTHER; note = Phosphorothioate (PS) linkage
  modified_base 118: mod_base = cm
  modified_base 119: mod_base = OTHER; note = Phosphorothioate (PS) linkage
  modified_base 119: mod_base = OTHER; note = 2'-O-methyladenosine
  modified_base 120: mod_base = OTHER; note = Phosphorothioate (PS) linkage
  modified_base 120: mod_base = gm
  source 1..120: mol_type = other RNA

SEQ ID NO: 678 - RNA, 119 nt, synthetic construct; identical to SEQ ID NO: 618
  modified_base 1: mod_base = cm
  modified_base 2: mod_base = OTHER; note = Phosphorothioate (PS) linkage
  modified_base 2: mod_base = um
  modified_base 3: mod_base = OTHER; note = Phosphorothioate (PS) linkage
  modified_base 3: mod_base = gm
  modified_base 4: mod_base = OTHER; note = Phosphorothioate (PS) linkage
  modified_base 117: mod_base = OTHER; note = Phosphorothioate (PS) linkage
  modified_base 117: mod_base = um
  modified_base 118: mod_base = OTHER; note = Phosphorothioate (PS) linkage
  modified_base 118: mod_base = cm
  modified_base 119: mod_base = OTHER; note = Phosphorothioate (PS) linkage
  modified_base 119: mod_base = OTHER; note = 2'-O-methyladenosine
  source 1..119: mol_type = other RNA

SEQ ID NO: 679 - RNA, 118 nt, synthetic construct; identical to SEQ ID NO: 619
  modified_base 1: mod_base = cm
  modified_base 2: mod_base = OTHER; note = Phosphorothioate (PS) linkage
  modified_base 2: mod_base = um
  modified_base 3: mod_base = OTHER; note = Phosphorothioate (PS) linkage
  modified_base 3: mod_base = gm
  modified_base 4: mod_base = OTHER; note = Phosphorothioate (PS) linkage
  modified_base 116: mod_base = OTHER; note = Phosphorothioate (PS) linkage
  modified_base 116: mod_base = gm
  modified_base 117: mod_base = OTHER; note = Phosphorothioate (PS) linkage
  modified_base 117: mod_base = um
  modified_base 118: mod_base = OTHER; note = Phosphorothioate (PS) linkage
  modified_base 118: mod_base = cm
  source 1..118: mol_type = other RNA

SEQ ID NO: 680 - RNA, 117 nt, synthetic construct; identical to SEQ ID NO: 620
  modified_base 1: mod_base = cm
  modified_base 2: mod_base = OTHER; note = Phosphorothioate (PS) linkage
  modified_base 2: mod_base = um
  modified_base 3: mod_base = OTHER; note = Phosphorothioate (PS) linkage
  modified_base 3: mod_base = gm
  modified_base 4: mod_base = OTHER; note = Phosphorothioate (PS) linkage
  modified_base 115: mod_base = OTHER; note = Phosphorothioate (PS) linkage
  modified_base 115: mod_base = gm
  modified_base 116: mod_base = OTHER; note = Phosphorothioate (PS) linkage
  modified_base 116: mod_base = gm
  modified_base 117: mod_base = OTHER; note = Phosphorothioate (PS) linkage
  modified_base 117: mod_base = um
  source 1..117: mol_type = other RNA

SEQ ID NO: 681 - RNA, 116 nt, synthetic construct; identical to SEQ ID NO: 621
  modified_base 1: mod_base = cm
  modified_base 2: mod_base = OTHER; note = Phosphorothioate (PS) linkage
  modified_base 2: mod_base = um
  modified_base 3: mod_base = OTHER; note = Phosphorothioate (PS) linkage
  modified_base 3: mod_base = gm
  modified_base 4: mod_base = OTHER; note = Phosphorothioate (PS) linkage
  modified_base 114: mod_base = OTHER; note = Phosphorothioate (PS) linkage
  modified_base 114: mod_base = um
  modified_base 115: mod_base = OTHER; note = Phosphorothioate (PS) linkage
  modified_base 115: mod_base = gm
  modified_base 116: mod_base = OTHER; note = Phosphorothioate (PS) linkage
  modified_base 116: mod_base = gm
  source 1..116: mol_type = other RNA

SEQ ID NO: 682 - RNA, 115 nt, synthetic construct; identical to SEQ ID NO: 622
  modified_base 1: mod_base = cm
  modified_base 2: mod_base = OTHER; note = Phosphorothioate (PS) linkage
  modified_base 2: mod_base = um
  modified_base 3: mod_base = OTHER; note = Phosphorothioate (PS) linkage
  modified_base 3: mod_base = gm
  modified_base 4: mod_base = OTHER; note = Phosphorothioate (PS) linkage
  modified_base 113: mod_base = OTHER; note = Phosphorothioate (PS) linkage
  modified_base 113: mod_base = OTHER; note = 2'-O-methyladenosine
  modified_base 114: mod_base = OTHER; note = Phosphorothioate (PS) linkage
  modified_base 114: mod_base = um
  modified_base 115: mod_base = OTHER; note = Phosphorothioate (PS) linkage
  modified_base 115: mod_base = gm
  source 1..115: mol_type = other RNA

SEQ ID NO: 683 - RNA, 87 nt, synthetic construct
  source 1..87: mol_type = other RNA
gtttttgtactctcaagaaattgcagaagctacaaagataaggcttcatgccgaaatcaacaccctgtcattttatggcagggtgtt

SEQ ID NO: 684 - RNA, 87 nt, synthetic construct
  source 1..87: mol_type = other RNA
gtttgcgtactctcaagaaattgcagaagctacgcagataaggcttcatgccgaaatcaacaccctgtcattttatggcagggtgtt

SEQ ID NO: 685 - RNA, 80 nt, synthetic construct
  source 1..80: mol_type = other RNA
gtttttgtactctgaaaagaagctacaaagataaggcttcatgccgaaatcaacaccctgtcattttatggcagggtgtt

SEQ ID NO: 686 - RNA, 75 nt, synthetic construct
  source 1..75: mol_type = other RNA
gtttttgtacgttcgcgctacaaagataaggcttcatgccgaaatcaacaccctgtcattttatggcagggtgtt

SEQ ID NO: 687 - RNA, 80 nt, synthetic construct
  source 1..80: mol_type = other RNA
gtttgcgtactctgaaaagaagctacgcagataaggcttcatgccgaaatcaacaccctgtcattttatggcagggtgtt

SEQ ID NO: 688 - RNA, 75 nt, synthetic construct
  source 1..75: mol_type = other RNA
gtttgcgtacgttcgcgctacgcagataaggcttcatgccgaaatcaacaccctgtcattttatggcagggtgtt

SEQ ID NO: 689 - RNA, 62 nt, synthetic construct
  source 1..62: mol_type = other RNA
gtttttgtactctcaagaaattgcagaagctacaaagataaggcttcatgccgaaatcaaca

SEQ ID NO: 690 - RNA, 60 nt, synthetic construct
  source 1..60: mol_type = other RNA
gtttttgtactctcaagaaattgcagaagctacaaagataaggcttcatgccgaaatcaa

SEQ ID NO: 691 - RNA, 58 nt, synthetic construct
  source 1..58: mol_type = other RNA
gtttttgtactctcaagaaattgcagaagctacaaagataaggcttcatgccgaaatc

SEQ ID NO: 692 - RNA, 56 nt, synthetic construct
  source 1..56: mol_type = other RNA
gtttttgtactctcaagaaattgcagaagctacaaagataaggcttcatgccgaaa

SEQ ID NO: 693 - RNA, 54 nt, synthetic construct
  source 1..54: mol_type = other RNA
gtttttgtactctcaagaaattgcagaagctacaaagataaggcttcatgccga

SEQ ID NO: 694 - RNA, 62 nt, synthetic construct
  source 1..62: mol_type = other RNA
gtttgcgtactctcaagaaattgcagaagctacgcagataaggcttcatgccgaaatcaaca

SEQ ID NO: 695 - RNA, 55 nt, synthetic construct
  source 1..55: mol_type = other RNA
gtttttgtactctgaaaagaagctacaaagataaggcttcatgccgaaatcaaca

SEQ ID NO: 696 - RNA, 50 nt, synthetic construct
  source 1..50: mol_type = other RNA
gtttttgtacgttcgcgctacaaagataaggcttcatgccgaaatcaaca

SEQ ID NO: 697 - RNA, 55 nt, synthetic construct
  source 1..55: mol_type = other RNA
gtttgcgtactctgaaaagaagctacgcagataaggcttcatgccgaaatcaaca

SEQ ID NO: 698 - RNA, 50 nt, synthetic construct
  source 1..50: mol_type = other RNA
gtttgcgtacgttcgcgctacgcagataaggcttcatgccgaaatcaaca

SEQ ID NO: 699 - RNA, 60 nt, synthetic construct
  source 1..60: mol_type = other RNA
gtttgcgtactctcaagaaattgcagaagctacgcagataaggcttcatgccgaaatcaa

SEQ ID NO: 700 - RNA, 53 nt, synthetic construct
  source 1..53: mol_type = other RNA
gtttttgtactctgaaaagaagctacaaagataaggcttcatgccgaaatcaa

SEQ ID NO: 701 - RNA, 48 nt, synthetic construct
  source 1..48: mol_type = other RNA
gtttttgtacgttcgcgctacaaagataaggcttcatgccgaaatcaa

SEQ ID NO: 702 - RNA, 53 nt, synthetic construct
  source 1..53: mol_type = other RNA
gtttgcgtactctgaaaagaagctacgcagataaggcttcatgccgaaatcaa

SEQ ID NO: 703 - RNA, 48 nt, synthetic construct
  source 1..48: mol_type = other RNA
gtttgcgtacgttcgcgctacgcagataaggcttcatgccgaaatcaa

SEQ ID NO: 704 - RNA, 58 nt, synthetic construct
  source 1..58: mol_type = other RNA
gtttgcgtactctcaagaaattgcagaagctacgcagataaggcttcatgccgaaatc

SEQ ID NO: 705 - RNA, 51 nt, synthetic construct
  source 1..51: mol_type = other RNA
gtttttgtactctgaaaagaagctacaaagataaggcttcatgccgaaatc

SEQ ID NO: 706 - RNA, 46 nt, synthetic construct
  source 1..46: mol_type = other RNA
gtttttgtacgttcgcgctacaaagataaggcttcatgccgaaatc

SEQ ID NO: 707 - RNA, 51 nt, synthetic construct
  source 1..51: mol_type = other RNA
gtttgcgtactctgaaaagaagctacgcagataaggcttcatgccgaaatc

SEQ ID NO: 708 - RNA, 46 nt, synthetic construct
  source 1..46: mol_type = other RNA
gtttgcgtacgttcgcgctacgcagataaggcttcatgccgaaatc

SEQ ID NO: 709 - RNA, 56 nt, synthetic construct
  source 1..56: mol_type = other RNA
gtttgcgtactctcaagaaattgcagaagctacgcagataaggcttcatgccgaaa

SEQ ID NO: 710 - RNA, 49 nt, synthetic construct
  source 1..49: mol_type = other RNA
gtttttgtactctgaaaagaagctacaaagataaggcttcatgccgaaa

SEQ ID NO: 711 - RNA, 44 nt, synthetic construct
  source 1..44: mol_type = other RNA
gtttttgtacgttcgcgctacaaagataaggcttcatgccgaaa

SEQ ID NO: 712 - RNA, 49 nt, synthetic construct
  source 1..49: mol_type = other RNA
gtttgcgtactctgaaaagaagctacgcagataaggcttcatgccgaaa

SEQ ID NO: 713 - RNA, 44 nt, synthetic construct
  source 1..44: mol_type = other RNA
gtttgcgtacgttcgcgctacgcagataaggcttcatgccgaaa

SEQ ID NO: 714 - RNA, 54 nt, synthetic construct
  source 1..54: mol_type = other RNA
gtttgcgtactctcaagaaattgcagaagctacgcagataaggcttcatgccga

SEQ ID NO: 715 - RNA, 47 nt, synthetic construct
  source 1..47: mol_type = other RNA
gtttttgtactctgaaaagaagctacaaagataaggcttcatgccga

SEQ ID NO: 716 - RNA, 42 nt, synthetic construct
  source 1..42: mol_type = other RNA
gtttttgtacgttcgcgctacaaagataaggcttcatgccga

SEQ ID NO: 717 - RNA, 47 nt, synthetic construct
  source 1..47: mol_type = other RNA
gtttgcgtactctgaaaagaagctacgcagataaggcttcatgccga

SEQ ID NO: 718 - RNA, 42 nt, synthetic construct
  source 1..42: mol_type = other RNA
gtttgcgtacgttcgcgctacgcagataaggcttcatgccga

SEQ ID NO: 719 - RNA, 123 nt, synthetic construct; identical to SEQ ID NO: 567
  source 1..123: mol_type = other RNA

SEQ ID NO: 720 - RNA, 123 nt, synthetic construct
  source 1..123: mol_type = other RNA
aaggctgtgctgaccatcgagtttgcgtactctcaagaaattgcagaagctacgcagataaggcttcatgccgaaatcaacaccctgtcattttatggcagggtgtttctcgtcgatggtcag

SEQ ID NO: 721 - RNA, 116 nt, synthetic construct
  source 1..116: mol_type = other RNA
aaggctgtgctgaccatcgagtttttgtactctgaaaagaagctacaaagataaggcttcatgccgaaatcaacaccctgtcattttatggcagggtgtttctcgtcgatggtcag

SEQ ID NO: 722 - RNA, 111 nt, synthetic construct
  source 1..111: mol_type = other RNA
aaggctgtgctgaccatcgagtttttgtacgttcgcgctacaaagataaggcttcatgccgaaatcaacaccctgtcattttatggcagggtgtttctcgtcgatggtcag

SEQ ID NO: 723 - RNA, 116 nt, synthetic construct
  source 1..116: mol_type = other RNA
aaggctgtgctgaccatcgagtttgcgtactctgaaaagaagctacgcagataaggcttcatgccgaaatcaacaccctgtcattttatggcagggtgtttctcgtcgatggtcag

SEQ ID NO: 724 - RNA, 111 nt, synthetic construct
  source 1..111: mol_type = other RNA
aaggctgtgctgaccatcgagtttgcgtacgttcgcgctacgcagataaggcttcatgccgaaatcaacaccctgtcattttatggcagggtgtttctcgtcgatggtcag

SEQ ID NO: 725 - RNA, 98 nt, synthetic construct
  source 1..98: mol_type = other RNA
aaggctgtgctgaccatcgagtttttgtactctcaagaaattgcagaagctacaaagataaggcttcatgccgaaatcaacatctcgtcgatggtcag

SEQ ID NO: 726 - RNA, 96 nt, synthetic construct
  source 1..96: mol_type = other RNA
aaggctgtgctgaccatcgagtttttgtactctcaagaaattgcagaagctacaaagataaggcttcatgccgaaatcaatctcgtcgatggtcag

SEQ ID NO: 727 - RNA, 94 nt, synthetic construct
  source 1..94: mol_type = other RNA
aaggctgtgctgaccatcgagtttttgtactctcaagaaattgcagaagctacaaagataaggcttcatgccgaaatctctcgtcgatggtcag

SEQ ID NO: 728 - RNA, 92 nt, synthetic construct
  source 1..92: mol_type = other RNA
aaggctgtgctgaccatcgagtttttgtactctcaagaaattgcagaagctacaaagataaggcttcatgccgaaatctcgtcgatggtcag

SEQ ID NO: 729 - RNA, 90 nt, synthetic construct
  source 1..90: mol_type = other RNA
aaggctgtgctgaccatcgagtttttgtactctcaagaaattgcagaagctacaaagataaggcttcatgccgatctcgtcgatggtcag

SEQ ID NO: 730 - RNA, 98 nt, synthetic construct
  source 1..98: mol_type = other RNA
aaggctgtgctgaccatcgagtttgcgtactctcaagaaattgcagaagctacgcagataaggcttcatgccgaaatcaacatctcgtcgatggtcag

SEQ ID NO: 731 - RNA, 91 nt, synthetic construct
  source 1..91: mol_type = other RNA
aaggctgtgctgaccatcgagtttttgtactctgaaaagaagctacaaagataaggcttcatgccgaaatcaacatctcgtcgatggtcag

SEQ ID NO: 732 - RNA, 86 nt, synthetic construct
  source 1..86: mol_type = other RNA
aaggctgtgctgaccatcgagtttttgtacgttcgcgctacaaagataaggcttcatgccgaaatcaacatctcgtcgatggtcag

SEQ ID NO: 733 - RNA, 91 nt, synthetic construct
  source 1..91: mol_type = other RNA
aaggctgtgctgaccatcgagtttgcgtactctgaaaagaagctacgcagataaggcttcatgccgaaatcaacatctcgtcgatggtcag

SEQ ID NO: 734 - RNA, 86 nt, synthetic construct
  source 1..86: mol_type = other RNA
aaggctgtgctgaccatcgagtttgcgtacgttcgcgctacgcagataaggcttcatgccgaaatcaacatctcgtcgatggtcag

SEQ ID NO: 735 - RNA, 96 nt, synthetic construct
  source 1..96: mol_type = other RNA
aaggctgtgctgaccatcgagtttgcgtactctcaagaaattgcagaagctacgcagataaggcttcatgccgaaatcaatctcgtcgatggtcag

SEQ ID NO: 736 - RNA, 89 nt, synthetic construct
  source 1..89: mol_type = other RNA
aaggctgtgctgaccatcgagtttttgtactctgaaaagaagctacaaagataaggcttcatgccgaaatcaatctcgtcgatggtcag

SEQ ID NO: 737 - RNA, 84 nt, synthetic construct
  source 1..84: mol_type = other RNA
aaggctgtgctgaccatcgagtttttgtacgttcgcgctacaaagataaggcttcatgccgaaatcaatctcgtcgatggtcag

SEQ ID NO: 738 - RNA, 89 nt, synthetic construct
  source 1..89: mol_type = other RNA
aaggctgtgctgaccatcgagtttgcgtactctgaaaagaagctacgcagataaggcttcatgccgaaatcaatctcgtcgatggtcag

SEQ ID NO: 739 - RNA, 84 nt, synthetic construct
  source 1..84: mol_type = other RNA
aaggctgtgctgaccatcgagtttgcgtacgttcgcgctacgcagataaggcttcatgccgaaatcaatctcgtcgatggtcag

SEQ ID NO: 740 - RNA, 94 nt, synthetic construct
  source 1..94: mol_type = other RNA
aaggctgtgctgaccatcgagtttgcgtactctcaagaaattgcagaagctacgcagataaggcttcatgccgaaatctctcgtcgatggtcag

SEQ ID NO: 741 - RNA, 87 nt, synthetic construct
  source 1..87: mol_type = other RNA
aaggctgtgctgaccatcgagtttttgtactctgaaaagaagctacaaagataaggcttcatgccgaaatctctcgtcgatggtcag

SEQ ID NO: 742 - RNA, 82 nt, synthetic construct
  source 1..82: mol_type = other RNA
aaggctgtgctgaccatcgagtttttgtacgttcgcgctacaaagataaggcttcatgccgaaatctctcgtcgatggtcag

SEQ ID NO: 743 - RNA, 87 nt, synthetic construct
  source 1..87: mol_type = other RNA
aaggctgtgctgaccatcgagtttgcgtactctgaaaagaagctacgcagataaggcttcatgccgaaatctctcgtcgatggtcag

SEQ ID NO: 744 - RNA, 82 nt, synthetic construct
  source 1..82: mol_type = other RNA
aaggctgtgctgaccatcgagtttgcgtacgttcgcgctacgcagataaggcttcatgccgaaatctctcgtcgatggtcag

SEQ ID NO: 745 - RNA, 92 nt, synthetic construct
  source 1..92: mol_type = other RNA
aaggctgtgctgaccatcgagtttgcgtactctcaagaaattgcagaagctacgcagataaggcttcatgccgaaatctcgtcgatggtcag

SEQ ID NO: 746 - RNA, 85 nt, synthetic construct
  source 1..85: mol_type = other RNA
aaggctgtgctgaccatcgagtttttgtactctgaaaagaagctacaaagataaggcttcatgccgaaatctcgtcgatggtcag

SEQ ID NO: 747 - RNA, 80 nt, synthetic construct
  source 1..80: mol_type = other RNA
aaggctgtgctgaccatcgagtttttgtacgttcgcgctacaaagataaggcttcatgccgaaatctcgtcgatggtcag

SEQ ID NO: 748 - RNA, 85 nt, synthetic construct
  source 1..85: mol_type = other RNA
aaggctgtgctgaccatcgagtttgcgtactctgaaaagaagctacgcagataaggcttcatgccgaaatctcgtcgatggtcag

SEQ ID NO: 749 - RNA, 80 nt, synthetic construct
  source 1..80: mol_type = other RNA
aaggctgtgctgaccatcgagtttgcgtacgttcgcgctacgcagataaggcttcatgccgaaatctcgtcgatggtcag

SEQ ID NO: 750 - RNA, 90 nt, synthetic construct
  source 1..90: mol_type = other RNA
aaggctgtgctgaccatcgagtttgcgtactctcaagaaattgcagaagctacgcagataaggcttcatgccgatctcgtcgatggtcag

SEQ ID NO: 751 - RNA, 83 nt, synthetic construct
  source 1..83: mol_type = other RNA
aaggctgtgctgaccatcgagtttttgtactctgaaaagaagctacaaagataaggcttcatgccgatctcgtcgatggtcag

SEQ ID NO: 752 - RNA, 78 nt, synthetic construct
  source 1..78: mol_type = other RNA
aaggctgtgctgaccatcgagtttttgtacgttcgcgctacaaagataaggcttcatgccgatctcgtcgatggtcag

SEQ ID NO: 753 - RNA, 83 nt, synthetic construct
  source 1..83: mol_type = other RNA
aaggctgtgctgaccatcgagtttgcgtactctgaaaagaagctacgcagataaggcttcatgccgatctcgtcgatggtcag

SEQ ID NO: 754 - RNA, 78 nt, synthetic construct
  source 1..78: mol_type = other RNA
aaggctgtgctgaccatcgagtttgcgtacgttcgcgctacgcagataaggcttcatgccgatctcgtcgatggtcag

SEQ ID NO: 755 - RNA, 123 nt, synthetic construct; identical to SEQ ID NO: 567
  modified_base 1: mod_base = OTHER; note = 2'-O-methyladenosine
  modified_base 2: mod_base = OTHER; note = Phosphorothioate (PS) linkage
  modified_base 2: mod_base = OTHER; note = 2'-O-methyladenosine
  modified_base 3: mod_base = OTHER; note = Phosphorothioate (PS) linkage
  modified_base 3: mod_base = gm
  modified_base 4: mod_base = OTHER; note = Phosphorothioate (PS) linkage
  modified_base 121: mod_base = OTHER; note = Phosphorothioate (PS) linkage
  modified_base 121: mod_base = cm
  modified_base 122: mod_base = OTHER; note = Phosphorothioate (PS) linkage
  modified_base 122: mod_base = OTHER; note = 2'-O-methyladenosine
  modified_base 123: mod_base = OTHER; note = Phosphorothioate (PS) linkage
  modified_base 123: mod_base = gm
  source 1..123: mol_type = other RNA

SEQ ID NO: 756 - RNA, 123 nt, synthetic construct; identical to SEQ ID NO: 720
  modified_base 1: mod_base = OTHER; note = 2'-O-methyladenosine
  modified_base 2: mod_base = OTHER; note = Phosphorothioate (PS) linkage
  modified_base 2: mod_base = OTHER; note = 2'-O-methyladenosine
  modified_base 3: mod_base = OTHER; note = Phosphorothioate (PS) linkage
  modified_base 3: mod_base = gm
  modified_base 4: mod_base = OTHER; note = Phosphorothioate (PS) linkage
  modified_base 121: mod_base = OTHER; note = Phosphorothioate (PS) linkage
  modified_base 121: mod_base = cm
  modified_base 122: mod_base = OTHER; note = Phosphorothioate (PS) linkage
  modified_base 122: mod_base = OTHER; note = 2'-O-methyladenosine
  modified_base 123: mod_base = OTHER; note = Phosphorothioate (PS) linkage
  modified_base 123: mod_base = gm
  source 1..123: mol_type = other RNA

SEQ ID NO: 757 - RNA, 116 nt, synthetic construct; identical to SEQ ID NO: 721
  modified_base 1: mod_base = OTHER; note = 2'-O-methyladenosine
  modified_base 2: mod_base = OTHER; note = Phosphorothioate (PS) linkage
  modified_base 2: mod_base = OTHER; note = 2'-O-methyladenosine
  modified_base 3: mod_base = OTHER; note = Phosphorothioate (PS) linkage
  modified_base 3: mod_base = gm
  modified_base 4: mod_base = OTHER; note = Phosphorothioate (PS) linkage
  modified_base 114: mod_base = OTHER; note = Phosphorothioate (PS) linkage
  modified_base 114: mod_base = cm
  modified_base 115: mod_base = OTHER; note = Phosphorothioate (PS) linkage
  modified_base 115: mod_base = OTHER; note = 2'-O-methyladenosine
  modified_base 116: mod_base = OTHER; note = Phosphorothioate (PS) linkage
  modified_base 116: mod_base = gm
  source 1..116: mol_type = other RNA

SEQ ID NO: 758 - RNA, 111 nt, synthetic construct; identical to SEQ ID NO: 722
  modified_base 1: mod_base = OTHER; note = 2'-O-methyladenosine
  modified_base 2: mod_base = OTHER; note = Phosphorothioate (PS) linkage
  modified_base 2: mod_base = OTHER; note = 2'-O-methyladenosine
  modified_base 3: mod_base = OTHER; note = Phosphorothioate (PS) linkage
  modified_base 3: mod_base = gm
  modified_base 4: mod_base = OTHER; note = Phosphorothioate (PS) linkage
  modified_base 109: mod_base = OTHER; note = Phosphorothioate (PS) linkage
  modified_base 109: mod_base = cm
  modified_base 110: mod_base = OTHER; note = Phosphorothioate (PS) linkage
  modified_base 110: mod_base = OTHER; note = 2'-O-methyladenosine
  modified_base 111: mod_base = OTHER; note = Phosphorothioate (PS) linkage
  modified_base 111: mod_base = gm
  source 1..111: mol_type = other RNA

SEQ ID NO: 759 - RNA, 116 nt, synthetic construct; identical to SEQ ID NO: 723
  modified_base 1: mod_base = OTHER; note = 2'-O-methyladenosine
  modified_base 2: mod_base = OTHER; note = Phosphorothioate (PS) linkage
  modified_base 2: mod_base = OTHER; note = 2'-O-methyladenosine
  modified_base 3: mod_base = OTHER; note = Phosphorothioate (PS) linkage
  modified_base 3: mod_base = gm
  modified_base 4: mod_base = OTHER; note = Phosphorothioate (PS) linkage
  modified_base 114: mod_base = OTHER; note = Phosphorothioate (PS) linkage
  modified_base 114: mod_base = cm
  modified_base 115: mod_base = OTHER; note = Phosphorothioate (PS) linkage
  modified_base 115: mod_base = OTHER; note = 2'-O-methyladenosine
  modified_base 116: mod_base = OTHER; note = Phosphorothioate (PS) linkage
  modified_base 116: mod_base = gm
  source 1..116: mol_type = other RNA

SEQ ID NO: 760 - RNA, 111 nt, synthetic construct; identical to SEQ ID NO: 724
  modified_base 1: mod_base = OTHER; note = 2'-O-methyladenosine
  modified_base 2: mod_base = OTHER; note = Phosphorothioate (PS) linkage
  modified_base 2: mod_base = OTHER; note = 2'-O-methyladenosine
  modified_base 3: mod_base = OTHER; note = Phosphorothioate (PS) linkage
  modified_base 3: mod_base = gm
  modified_base 4: mod_base = OTHER; note = Phosphorothioate (PS) linkage
  modified_base 109: mod_base = OTHER; note = Phosphorothioate (PS) linkage
  modified_base 109: mod_base = cm
  modified_base 110: mod_base = OTHER; note = Phosphorothioate (PS) linkage
  modified_base 110: mod_base = OTHER; note = 2'-O-methyladenosine
  modified_base 111: mod_base = OTHER; note = Phosphorothioate (PS) linkage
  modified_base 111: mod_base = gm
  source 1..111: mol_type = other RNA

SEQ ID NO: 761 - RNA, 98 nt, synthetic construct; identical to SEQ ID NO: 725
  modified_base 1: mod_base = OTHER; note = 2'-O-methyladenosine
  modified_base 2: mod_base = OTHER; note = Phosphorothioate (PS) linkage
  modified_base 2: mod_base = OTHER; note = 2'-O-methyladenosine
  modified_base 3: mod_base = OTHER; note = Phosphorothioate (PS) linkage
  modified_base 3: mod_base = gm
  modified_base 4: mod_base = OTHER; note = Phosphorothioate (PS) linkage
  modified_base 96: mod_base = OTHER; note = Phosphorothioate (PS) linkage
  modified_base 96: mod_base = cm
  modified_base 97: mod_base = OTHER; note = Phosphorothioate (PS) linkage
  modified_base 97: mod_base = OTHER; note = 2'-O-methyladenosine
  modified_base 98: mod_base = OTHER; note = Phosphorothioate (PS) linkage
  modified_base 98: mod_base = gm
  source 1..98: mol_type = other RNA

SEQ ID NO: 762 - RNA, 96 nt, synthetic construct; identical to SEQ ID NO: 726
  modified_base 1: mod_base = OTHER; note = 2'-O-methyladenosine
  modified_base 2: mod_base = OTHER; note = Phosphorothioate (PS) linkage
  modified_base 2: mod_base = OTHER; note = 2'-O-methyladenosine
  modified_base 3: mod_base = OTHER; note = Phosphorothioate (PS) linkage
  modified_base 3: mod_base = gm
  modified_base 4: mod_base = OTHER; note = Phosphorothioate (PS) linkage
  modified_base 94: mod_base = OTHER; note = Phosphorothioate (PS) linkage
  modified_base 94: mod_base = cm
  modified_base 95: mod_base = OTHER; note = Phosphorothioate (PS) linkage
  modified_base 95: mod_base = OTHER; note = 2'-O-methyladenosine
  modified_base 96: mod_base = OTHER; note = Phosphorothioate (PS) linkage
  modified_base 96: mod_base = gm
  source 1..96: mol_type = other RNA

SEQ ID NO: 763 - RNA, 94 nt, synthetic construct; identical to SEQ ID NO: 727
  modified_base 1: mod_base = OTHER; note = 2'-O-methyladenosine
  modified_base 2: mod_base = OTHER; note = Phosphorothioate (PS) linkage
  modified_base 2: mod_base = OTHER; note = 2'-O-methyladenosine
  modified_base 3: mod_base = OTHER; note = Phosphorothioate (PS) linkage
  modified_base 3: mod_base = gm
  modified_base 4: mod_base = OTHER; note = Phosphorothioate (PS) linkage
  modified_base 92: mod_base = OTHER; note = Phosphorothioate (PS) linkage
  modified_base 92: mod_base = cm
  modified_base 93: mod_base = OTHER; note = Phosphorothioate (PS) linkage
  modified_base 93: mod_base = OTHER; note = 2'-O-methyladenosine
  modified_base 94: mod_base = OTHER; note = Phosphorothioate (PS) linkage
  modified_base 94: mod_base = gm
  source 1..94: mol_type = other RNA

SEQ ID NO: 764 - RNA, 92 nt, synthetic construct; identical to SEQ ID NO: 728
  modified_base 1: mod_base = OTHER; note = 2'-O-methyladenosine
  modified_base 2: mod_base = OTHER; note = Phosphorothioate (PS) linkage
  modified_base 2: mod_base = OTHER; note = 2'-O-methyladenosine
  modified_base 3: mod_base = OTHER; note = Phosphorothioate (PS) linkage
  modified_base 3: mod_base = gm
  modified_base 4: mod_base = OTHER; note = Phosphorothioate (PS) linkage
  modified_base 90: mod_base = OTHER; note = Phosphorothioate (PS) linkage
  modified_base 90: mod_base = cm
  modified_base 91: mod_base = OTHER; note = Phosphorothioate (PS) linkage
  modified_base 91: mod_base = OTHER; note = 2'-O-methyladenosine
  modified_base 92: mod_base = OTHER; note = Phosphorothioate (PS) linkage
  modified_base 92: mod_base = gm
  source 1..92: mol_type = other RNA

SEQ ID NO: 765 - RNA, 90 nt, synthetic construct; identical to SEQ ID NO: 729
  modified_base 1: mod_base = OTHER; note = 2'-O-methyladenosine
  modified_base 2: mod_base = OTHER; note = Phosphorothioate (PS) linkage
  modified_base 2: mod_base = OTHER; note = 2'-O-methyladenosine
  modified_base 3: mod_base = OTHER; note = Phosphorothioate (PS) linkage
  modified_base 3: mod_base = gm
  modified_base 4: mod_base = OTHER; note = Phosphorothioate (PS) linkage
  modified_base 88: mod_base = OTHER; note = Phosphorothioate (PS) linkage
  modified_base 88: mod_base = cm
  modified_base 89: mod_base = OTHER; note = Phosphorothioate (PS) linkage
  modified_base 89: mod_base = OTHER; note = 2'-O-methyladenosine
  modified_base 90: mod_base = OTHER; note = Phosphorothioate (PS) linkage
  modified_base 90: mod_base = gm
  source 1..90: mol_type = other RNA

SEQ ID NO: 766 - RNA, 98 nt, synthetic construct; identical to SEQ ID NO: 730
  modified_base 1: mod_base = OTHER; note = 2'-O-methyladenosine
  modified_base 2: mod_base = OTHER; note = Phosphorothioate (PS) linkage
  modified_base 2: mod_base = OTHER; note = 2'-O-methyladenosine
  modified_base 3: mod_base = OTHER; note = Phosphorothioate (PS) linkage
  modified_base 3: mod_base = gm
  modified_base 4: mod_base = OTHER; note = Phosphorothioate (PS) linkage
  modified_base 96: mod_base = OTHER; note = Phosphorothioate (PS) linkage
  modified_base 96: mod_base = cm
  modified_base 97: mod_base = OTHER; note = Phosphorothioate (PS) linkage
  modified_base 97: mod_base = OTHER; note = 2'-O-methyladenosine
  modified_base 98: mod_base = OTHER; note = Phosphorothioate (PS) linkage
  modified_base 98: mod_base = gm
  source 1..98: mol_type = other RNA

SEQ ID NO: 767 - RNA, 91 nt, synthetic construct; identical to SEQ ID NO: 731
  modified_base 1: mod_base = OTHER; note = 2'-O-methyladenosine
  modified_base 2: mod_base = OTHER; note = Phosphorothioate (PS) linkage
  modified_base 2: mod_base = OTHER; note = 2'-O-methyladenosine
  modified_base 3: mod_base = OTHER; note = Phosphorothioate (PS) linkage
  modified_base 3: mod_base = gm
  modified_base 4: mod_base = OTHER; note = Phosphorothioate (PS) linkage
  modified_base 89: mod_base = OTHER; note = Phosphorothioate (PS) linkage
  modified_base 89: mod_base = cm
  modified_base 90: mod_base = OTHER; note = Phosphorothioate (PS) linkage
  modified_base 90: mod_base = OTHER; note = 2'-O-methyladenosine
  modified_base 91: mod_base = OTHER; note = Phosphorothioate (PS) linkage
  modified_base 91: mod_base = gm
  source 1..91: mol_type = other RNA

SEQ ID NO: 768 - RNA, 86 nt, synthetic construct; identical to SEQ ID NO: 732
  modified_base 1: mod_base = OTHER; note = 2'-O-methyladenosine
  modified_base 2: mod_base = OTHER; note = Phosphorothioate (PS) linkage
  modified_base 2: mod_base = OTHER; note = 2'-O-methyladenosine
  modified_base 3: mod_base = OTHER; note = Phosphorothioate (PS) linkage
  modified_base 3: mod_base = gm
  modified_base 4: mod_base = OTHER; note = Phosphorothioate (PS) linkage
  modified_base 84: mod_base = OTHER; note = Phosphorothioate (PS) linkage
  modified_base 84: mod_base = cm
  modified_base 85: mod_base = OTHER; note = Phosphorothioate (PS) linkage
  modified_base 85: mod_base = OTHER; note = 2'-O-methyladenosine
  modified_base 86: mod_base = OTHER; note = Phosphorothioate (PS) linkage
  modified_base 86: mod_base = gm
  source 1..86: mol_type = other RNA

SEQ ID NO: 769 - RNA, 91 nt, synthetic construct; identical to SEQ ID NO: 733
  modified_base 1: mod_base = OTHER; note = 2'-O-methyladenosine
  modified_base 2: mod_base = OTHER; note = Phosphorothioate (PS) linkage
  modified_base 2: mod_base = OTHER; note = 2'-O-methyladenosine
  modified_base 3: mod_base = OTHER; note = Phosphorothioate (PS) linkage
  modified_base 3: mod_base = gm
  modified_base 4: mod_base = OTHER; note = Phosphorothioate (PS) linkage
  modified_base 89: mod_base = OTHER; note = Phosphorothioate (PS) linkage
  modified_base 89: mod_base = cm
  modified_base 90: mod_base = OTHER; note = Phosphorothioate (PS) linkage
  modified_base 90: mod_base = OTHER; note = 2'-O-methyladenosine
  modified_base 91: mod_base = OTHER; note = Phosphorothioate (PS) linkage
  modified_base 91: mod_base = gm
  source 1..91: mol_type = other RNA

SEQ ID NO: 770 - RNA, 86 nt, synthetic construct; identical to SEQ ID NO: 734
  modified_base 1: mod_base = OTHER; note = 2'-O-methyladenosine
  modified_base 2: mod_base = OTHER; note = Phosphorothioate (PS) linkage
  modified_base 2: mod_base = OTHER; note = 2'-O-methyladenosine
  modified_base 3: mod_base = OTHER; note = Phosphorothioate (PS) linkage
  modified_base 3: mod_base = gm
  modified_base 4: mod_base = OTHER; note = Phosphorothioate (PS) linkage
  modified_base 84: mod_base = OTHER; note = Phosphorothioate (PS) linkage
  modified_base 84: mod_base = cm
  modified_base 85: mod_base = OTHER; note = Phosphorothioate (PS) linkage
  modified_base 85: mod_base = OTHER; note = 2'-O-methyladenosine
  modified_base 86: mod_base = OTHER; note = Phosphorothioate (PS) linkage
  modified_base 86: mod_base = gm
  source 1..86: mol_type = other RNA

SEQ ID NO: 771 - RNA, 96 nt, synthetic construct; identical to SEQ ID NO: 735
  modified_base 1: mod_base = OTHER; note = 2'-O-methyladenosine
  modified_base 2: mod_base = OTHER; note = Phosphorothioate (PS) linkage
  modified_base 2: mod_base = OTHER; note = 2'-O-methyladenosine
  modified_base 3: mod_base = OTHER; note = Phosphorothioate (PS) linkage
  modified_base 3: mod_base = gm
  modified_base 4: mod_base = OTHER; note = Phosphorothioate (PS) linkage
  modified_base 94: mod_base = OTHER; note = Phosphorothioate (PS) linkage
  modified_base 94: mod_base = cm
  modified_base 95: mod_base = OTHER; note = Phosphorothioate (PS) linkage
  modified_base 95: mod_base = OTHER; note = 2'-O-methyladenosine
  modified_base 96: mod_base = OTHER; note = Phosphorothioate (PS) linkage
  modified_base 96: mod_base = gm
  source 1..96: mol_type = other RNA

SEQ ID NO: 772 - RNA, 89 nt, synthetic construct; identical to SEQ ID NO: 736
  modified_base 1: mod_base = OTHER; note = 2'-O-methyladenosine
  modified_base 2: mod_base = OTHER; note = Phosphorothioate (PS) linkage
  modified_base 2: mod_base = OTHER; note = 2'-O-methyladenosine
  modified_base 3: mod_base = OTHER; note = Phosphorothioate (PS) linkage
  modified_base 3: mod_base = gm
  modified_base 4: mod_base = OTHER; note = Phosphorothioate (PS) linkage
  modified_base 87: mod_base = OTHER; note = Phosphorothioate (PS) linkage
  modified_base 87: mod_base = cm
  modified_base 88: mod_base = OTHER; note = Phosphorothioate (PS) linkage
  modified_base 88: mod_base = OTHER; note = 2'-O-methyladenosine
  modified_base 89: mod_base = OTHER; note = Phosphorothioate (PS) linkage
  modified_base 89: mod_base = gm
  source 1..89: mol_type = other RNA

SEQ ID NO: 773 - RNA, 84 nt, synthetic construct; identical to SEQ ID NO: 737
  modified_base 1: mod_base = OTHER; note = 2'-O-methyladenosine
  modified_base 2: mod_base = OTHER; note = Phosphorothioate (PS) linkage
  modified_base 2: mod_base = OTHER; note = 2'-O-methyladenosine
  modified_base 3: mod_base = OTHER; note = Phosphorothioate (PS) linkage
  modified_base 3: mod_base = gm
  modified_base 4: mod_base = OTHER; note = Phosphorothioate (PS) linkage
  modified_base 82: mod_base = OTHER; note = Phosphorothioate (PS) linkage
  modified_base 82: mod_base = cm
  modified_base 83: mod_base = OTHER; note = Phosphorothioate (PS) linkage
  modified_base 83: mod_base = OTHER; note = 2'-O-methyladenosine
  modified_base 84: mod_base = OTHER; note = Phosphorothioate (PS) linkage
  modified_base 84: mod_base = gm
  source 1..84: mol_type = other RNA

SEQ ID NO: 774 - RNA, 89 nt, synthetic construct; identical to SEQ ID NO: 738
  modified_base 1: mod_base = OTHER; note = 2'-O-methyladenosine
  modified_base 2: mod_base = OTHER; note = Phosphorothioate (PS) linkage
  modified_base 2: mod_base = OTHER; note = 2'-O-methyladenosine
  modified_base 3: mod_base = OTHER; note = Phosphorothioate (PS) linkage
  modified_base 3: mod_base = gm
  modified_base 4: mod_base = OTHER; note = Phosphorothioate (PS) linkage
  modified_base 87: mod_base = OTHER; note = Phosphorothioate (PS) linkage
  modified_base 87: mod_base = cm
  modified_base 88: mod_base = OTHER; note = Phosphorothioate (PS) linkage
  modified_base 88: mod_base = OTHER; note = 2'-O-methyladenosine
  modified_base 89: mod_base = OTHER; note = Phosphorothioate (PS) linkage
  modified_base 89: mod_base = gm
  source 1..89: mol_type = other RNA

SEQ ID NO: 775 - RNA, 84 nt, synthetic construct; identical to SEQ ID NO: 739
  modified_base 1: mod_base = OTHER; note = 2'-O-methyladenosine
  modified_base 2: mod_base = OTHER; note = Phosphorothioate (PS) linkage
  modified_base 2: mod_base = OTHER; note = 2'-O-methyladenosine
  modified_base 3: mod_base = OTHER; note = Phosphorothioate (PS) linkage
  modified_base 3: mod_base = gm
  modified_base 4: mod_base = OTHER; note = Phosphorothioate (PS) linkage
  modified_base 82: mod_base = OTHER; note = Phosphorothioate (PS) linkage
  modified_base 82: mod_base = cm
  modified_base 83: mod_base = OTHER; note = Phosphorothioate (PS) linkage
  modified_base 83: mod_base = OTHER; note = 2'-O-methyladenosine
  modified_base 84: mod_base = OTHER; note = Phosphorothioate (PS) linkage
  modified_base 84: mod_base = gm
  source 1..84: mol_type = other RNA

SEQ ID NO: 776 - RNA, 94 nt, synthetic construct; identical to SEQ ID NO: 740
  modified_base 1: mod_base = OTHER; note = 2'-O-methyladenosine
  modified_base 2: mod_base = OTHER; note = Phosphorothioate (PS) linkage
  modified_base 2: mod_base = OTHER; note = 2'-O-methyladenosine
  modified_base 3: mod_base = OTHER; note = Phosphorothioate (PS) linkage
  modified_base 3: mod_base = gm
  modified_base 4: mod_base = OTHER; note = Phosphorothioate (PS) linkage
  modified_base 92: mod_base = OTHER; note = Phosphorothioate (PS) linkage
  modified_base 92: mod_base = cm
  modified_base 93: mod_base = OTHER; note = Phosphorothioate (PS) linkage
  modified_base 93: mod_base = OTHER; note = 2'-O-methyladenosine
  modified_base 94: mod_base = OTHER; note = Phosphorothioate (PS) linkage
  modified_base 94: mod_base = gm
  source 1..94: mol_type = other RNA

SEQ ID NO: 777 - RNA, 87 nt, synthetic construct; identical to SEQ ID NO: 741
  modified_base 1: mod_base = OTHER; note = 2'-O-methyladenosine
  modified_base 2: mod_base = OTHER; note = Phosphorothioate (PS) linkage
  modified_base 2: mod_base = OTHER; note = 2'-O-methyladenosine
  modified_base 3: mod_base = OTHER; note = Phosphorothioate (PS) linkage
  modified_base 3: mod_base = gm
  modified_base 4: mod_base = OTHER; note = Phosphorothioate (PS) linkage
  modified_base 85: mod_base = OTHER; note = Phosphorothioate (PS) linkage
  modified_base 85: mod_base = cm
  modified_base 86: mod_base = OTHER; note = Phosphorothioate (PS) linkage
  modified_base 86: mod_base = OTHER; note = 2'-O-methyladenosine
  modified_base 87: mod_base = OTHER; note = Phosphorothioate (PS) linkage
  modified_base 87: mod_base = gm
  source 1..87: mol_type = other RNA

SEQ ID NO: 778 - RNA, 82 nt, synthetic construct; identical to SEQ ID NO: 742
  modified_base 1: mod_base = OTHER; note = 2'-O-methyladenosine
  modified_base 2: mod_base = OTHER; note = Phosphorothioate (PS) linkage
  modified_base 2: mod_base = OTHER; note = 2'-O-methyladenosine
  modified_base 3: mod_base = OTHER; note = Phosphorothioate (PS) linkage
  modified_base 3: mod_base = gm
  modified_base 4: mod_base = OTHER; note = Phosphorothioate (PS) linkage
  modified_base 80: mod_base = OTHER; note = Phosphorothioate (PS) linkage
  modified_base 80: mod_base = cm
  modified_base 81: mod_base = OTHER; note = Phosphorothioate (PS) linkage
  modified_base 81: mod_base = OTHER; note = 2'-O-methyladenosine
  modified_base 82: mod_base = OTHER; note = Phosphorothioate (PS) linkage
  modified_base 82: mod_base = gm
  source 1..82: mol_type = other RNA

SEQ ID NO: 779 - RNA, 87 nt, synthetic construct; identical to SEQ ID NO: 743
  modified_base 1: mod_base = OTHER; note = 2'-O-methyladenosine
  modified_base 2: mod_base = OTHER; note = Phosphorothioate (PS) linkage
  modified_base 2: mod_base = OTHER; note = 2'-O-methyladenosine
  modified_base 3: mod_base = OTHER; note = Phosphorothioate (PS) linkage
  modified_base 3: mod_base = gm
  modified_base 4: mod_base = OTHER; note = Phosphorothioate (PS) linkage
  modified_base 85: mod_base = OTHER; note = Phosphorothioate (PS) linkage
  modified_base 85: mod_base = cm
  modified_base 86: mod_base = OTHER; note = Phosphorothioate (PS) linkage
  modified_base 86: mod_base = OTHER; note = 2'-O-methyladenosine
  modified_base 87: mod_base = OTHER; note = Phosphorothioate (PS) linkage
  modified_base 87: mod_base = gm
  source 1..87: mol_type = other RNA

SEQ ID NO: 780 - RNA, 82 nt, synthetic construct; identical to SEQ ID NO: 744
  modified_base 1: mod_base = OTHER; note = 2'-O-methyladenosine
  modified_base 2: mod_base = OTHER; note = Phosphorothioate (PS) linkage
  modified_base 2: mod_base = OTHER; note = 2'-O-methyladenosine
  modified_base 3: mod_base = OTHER; note = Phosphorothioate (PS) linkage
  modified_base 3: mod_base = gm
  modified_base 4: mod_base = OTHER; note = Phosphorothioate (PS) linkage
  modified_base 80: mod_base = OTHER; note = Phosphorothioate (PS) linkage
  modified_base 80: mod_base = cm
  modified_base 81: mod_base = OTHER; note = Phosphorothioate (PS) linkage
  modified_base 81: mod_base = OTHER; note = 2'-O-methyladenosine
  modified_base 82: mod_base = OTHER; note = Phosphorothioate (PS) linkage
  modified_base 82: mod_base = gm
  source 1..82: mol_type = other RNA

SEQ ID NO: 781 - RNA, 92 nt, synthetic construct; identical to SEQ ID NO: 745
  modified_base 1: mod_base = OTHER; note = 2'-O-methyladenosine
  modified_base 2: mod_base = OTHER; note = Phosphorothioate (PS) linkage
  modified_base 2: mod_base = OTHER; note = 2'-O-methyladenosine
  modified_base 3: mod_base = OTHER; note = Phosphorothioate (PS) linkage
  modified_base 3: mod_base = gm
  modified_base 4: mod_base = OTHER; note = Phosphorothioate (PS) linkage
  modified_base 90: mod_base = OTHER; note = Phosphorothioate (PS) linkage
  modified_base 90: mod_base = cm
  modified_base 91: mod_base = OTHER; note = Phosphorothioate (PS) linkage
  modified_base 91: mod_base = OTHER; note = 2'-O-methyladenosine
  modified_base 92: mod_base = OTHER; note = Phosphorothioate (PS) linkage
  modified_base 92: mod_base = gm
  source 1..92: mol_type = other RNA

SEQ ID NO: 782 - RNA, 85 nt, synthetic construct; identical to SEQ ID NO: 746
  modified_base 1: mod_base = OTHER; note = 2'-O-methyladenosine
  modified_base 2: mod_base = OTHER; note = Phosphorothioate (PS) linkage
  modified_base 2: mod_base = OTHER; note = 2'-O-methyladenosine
  modified_base 3: mod_base = OTHER; note = Phosphorothioate (PS) linkage
  modified_base 3: mod_base = gm
  modified_base 4: mod_base = OTHER; note = Phosphorothioate (PS) linkage
  modified_base 83: mod_base = OTHER; note = Phosphorothioate (PS) linkage
  modified_base 83: mod_base = cm
  modified_base 84: mod_base = OTHER; note = Phosphorothioate (PS) linkage
  modified_base 84: mod_base = OTHER; note = 2'-O-methyladenosine
  modified_base 85: mod_base = OTHER; note = Phosphorothioate (PS) linkage
  modified_base 85: mod_base = gm
  source 1..85: mol_type = other RNA

SEQ ID NO: 783 - RNA, 80 nt, synthetic construct; identical to SEQ ID NO: 747
  modified_base 1: mod_base = OTHER; note = 2'-O-methyladenosine
  modified_base 2: mod_base = OTHER; note = Phosphorothioate (PS) linkage
  modified_base 2: mod_base = OTHER; note = 2'-O-methyladenosine
  modified_base 3: mod_base = OTHER; note = Phosphorothioate (PS) linkage
  modified_base 3: mod_base = gm
  modified_base 4: mod_base = OTHER; note = Phosphorothioate (PS) linkage
  modified_base 78: mod_base = OTHER; note = Phosphorothioate (PS) linkage
  modified_base 78: mod_base = cm
  modified_base 79: mod_base = OTHER; note = Phosphorothioate (PS) linkage
  modified_base 79: mod_base = OTHER; note = 2'-O-methyladenosine
  modified_base 80: mod_base = OTHER; note = Phosphorothioate (PS) linkage
  modified_base 80: mod_base = gm
  source 1..80: mol_type = other RNA

SEQ ID NO: 784 - RNA, 85 nt, synthetic construct; identical to SEQ ID NO: 748
  modified_base 1: mod_base = OTHER; note = 2'-O-methyladenosine
  modified_base 2: mod_base = OTHER; note = Phosphorothioate (PS) linkage
  modified_base 2: mod_base = OTHER; note = 2'-O-methyladenosine
  modified_base 3: mod_base = OTHER; note = Phosphorothioate (PS) linkage
  modified_base 3: mod_base = gm
  modified_base 4: mod_base = OTHER; note = Phosphorothioate (PS) linkage
  modified_base 83: mod_base = OTHER; note = Phosphorothioate (PS) linkage
  modified_base 83: mod_base = cm
  modified_base 84: mod_base = OTHER; note = Phosphorothioate (PS) linkage
  modified_base 84: mod_base = OTHER; note = 2'-O-methyladenosine
  modified_base 85: mod_base = OTHER; note = Phosphorothioate (PS) linkage
  modified_base 85: mod_base = gm
  source 1..85: mol_type = other RNA

SEQ ID NO: 785 - RNA, 80 nt, synthetic construct; identical to SEQ ID NO: 749
  modified_base 1: mod_base = OTHER; note = 2'-O-methyladenosine
  modified_base 2: mod_base = OTHER; note = Phosphorothioate (PS) linkage
  modified_base 2: mod_base = OTHER; note = 2'-O-methyladenosine
  modified_base 3: mod_base = OTHER; note = Phosphorothioate (PS) linkage
  modified_base 3: mod_base = gm
  modified_base 4: mod_base = OTHER; note = Phosphorothioate (PS) linkage
  modified_base 78: mod_base = OTHER; note = Phosphorothioate (PS) linkage
  modified_base 78: mod_base = cm
  modified_base 79: mod_base = OTHER; note = Phosphorothioate (PS) linkage
  modified_base 79: mod_base = OTHER; note = 2'-O-methyladenosine
  modified_base 80: mod_base = OTHER; note = Phosphorothioate (PS) linkage
  modified_base 80: mod_base = gm
  source 1..80: mol_type = other RNA

SEQ ID NO: 786 - RNA, 90 nt, synthetic construct; identical to SEQ ID NO: 750
  modified_base 1: mod_base = OTHER; note = 2'-O-methyladenosine
  modified_base 2: mod_base = OTHER; note = Phosphorothioate (PS) linkage
  modified_base 2: mod_base = OTHER; note = 2'-O-methyladenosine
  modified_base 3: mod_base = OTHER; note = Phosphorothioate (PS) linkage
  modified_base 3: mod_base = gm
  modified_base 4: mod_base = OTHER; note = Phosphorothioate (PS) linkage
  modified_base 88: mod_base = OTHER; note = Phosphorothioate (PS) linkage
  modified_base 88: mod_base = cm
  modified_base 89: mod_base = OTHER; note = Phosphorothioate (PS) linkage
  modified_base 89: mod_base = OTHER; note = 2'-O-methyladenosine
  modified_base 90: mod_base = OTHER; note = Phosphorothioate (PS) linkage
  modified_base 90: mod_base = gm
  source 1..90: mol_type = other RNA

SEQ ID NO: 787 - RNA, 83 nt, synthetic construct; identical to SEQ ID NO: 751
  modified_base 1: mod_base = OTHER; note = 2'-O-methyladenosine
  modified_base 2: mod_base = OTHER; note = Phosphorothioate (PS) linkage
  modified_base 2: mod_base = OTHER; note = 2'-O-methyladenosine
  modified_base 3: mod_base = OTHER; note = Phosphorothioate (PS) linkage
  modified_base 3: mod_base = gm
  modified_base 4: mod_base = OTHER; note = Phosphorothioate (PS) linkage
  modified_base 81: mod_base = OTHER; note = Phosphorothioate (PS) linkage
  modified_base 81: mod_base = cm
  modified_base 82: mod_base = OTHER; note = Phosphorothioate (PS) linkage
  modified_base 82: mod_base = OTHER; note = 2'-O-methyladenosine
  modified_base 83: mod_base = OTHER; note = Phosphorothioate (PS) linkage
  modified_base 83: mod_base = gm
  source 1..83: mol_type = other RNA

SEQ ID NO: 788 - RNA, 78 nt, synthetic construct; identical to SEQ ID NO: 752
  modified_base 1: mod_base = OTHER; note = 2'-O-methyladenosine
  modified_base 2: mod_base = OTHER; note = Phosphorothioate (PS) linkage
  modified_base 2: mod_base = OTHER; note = 2'-O-methyladenosine
  modified_base 3: mod_base = OTHER; note = Phosphorothioate (PS) linkage
  modified_base 3: mod_base = gm
  modified_base 4: mod_base = OTHER; note = Phosphorothioate (PS) linkage
  modified_base 76: mod_base = OTHER; note = Phosphorothioate (PS) linkage
  modified_base 76: mod_base = cm
  modified_base 77: mod_base = OTHER; note = Phosphorothioate (PS) linkage
  modified_base 77: mod_base = OTHER; note = 2'-O-methyladenosine
  modified_base 78: mod_base = OTHER; note = Phosphorothioate (PS) linkage
  modified_base 78: mod_base = gm
  source 1..78: mol_type = other RNA

SEQ ID NO: 789 - RNA, 83 nt, synthetic construct; identical to SEQ ID NO: 753
  modified_base 1: mod_base = OTHER; note = 2'-O-methyladenosine
  modified_base 2: mod_base = OTHER; note = Phosphorothioate (PS) linkage
  modified_base 2: mod_base = OTHER; note = 2'-O-methyladenosine
  modified_base 3: mod_base = OTHER; note = Phosphorothioate (PS) linkage
  modified_base 3: mod_base = gm
  modified_base 4: mod_base = OTHER; note = Phosphorothioate (PS) linkage
  modified_base 81: mod_base = OTHER; note = Phosphorothioate (PS) linkage
  modified_base 81: mod_base = cm
  modified_base 82: mod_base = OTHER; note = Phosphorothioate (PS) linkage
  modified_base 82: mod_base = OTHER; note = 2'-O-methyladenosine
  modified_base 83: mod_base = OTHER; note = Phosphorothioate (PS) linkage
  modified_base 83: mod_base = gm
  source 1..83: mol_type = other RNA

SEQ ID NO: 790 - RNA, 78 nt, synthetic construct; identical to SEQ ID NO: 754
  modified_base 1: mod_base = OTHER; note = 2'-O-methyladenosine
  modified_base 2: mod_base = OTHER; note = Phosphorothioate (PS) linkage
  modified_base 2: mod_base = OTHER; note = 2'-O-methyladenosine
  modified_base 3: mod_base = OTHER; note = Phosphorothioate (PS) linkage
  modified_base 3: mod_base = gm
  modified_base 4: mod_base = OTHER; note = Phosphorothioate (PS) linkage
  modified_base 76: mod_base = OTHER; note = Phosphorothioate (PS) linkage
  modified_base 76: mod_base = cm
  modified_base 77: mod_base = OTHER; note = Phosphorothioate (PS) linkage
  modified_base 77: mod_base = OTHER; note = 2'-O-methyladenosine
  modified_base 78: mod_base = OTHER; note = Phosphorothioate (PS) linkage
  modified_base 78: mod_base = gm
  source 1..78: mol_type = other RNA

SEQ ID NO: 791 - RNA, 118 nt, synthetic construct
  modified_base 1: mod_base = um
  modified_base 2: mod_base = OTHER; note = Phosphorothioate (PS) linkage
  modified_base 2: mod_base = OTHER; note = 2'-O-methyladenosine
  modified_base 3: mod_base = OTHER; note = Phosphorothioate (PS) linkage
  modified_base 3: mod_base = gm
  modified_base 4: mod_base = OTHER; note = Phosphorothioate (PS) linkage
  modified_base 29: mod_base = gm
  modified_base 30: mod_base = cm
  modified_base 31: mod_base = um
  modified_base 32: mod_base = OTHER; note = 2'-O-methyladenosine
  modified_base 33: mod_base = gm
  modified_base 34: mod_base = OTHER; note = 2'-O-methyladenosine
  modified_base 35: mod_base = OTHER; note = 2'-O-methyladenosine
  modified_base 36: mod_base = OTHER; note = 2'-O-methyladenosine
  modified_base 37: mod_base = um
  modified_base 38: mod_base = OTHER; note = 2'-O-methyladenosine
  modified_base 39: mod_base = gm
  modified_base 40: mod_base = cm
  modified_base 68: mod_base = OTHER; note = 2'-O-methyladenosine
  modified_base 69: mod_base = OTHER; note = 2'-O-methyladenosine
  modified_base 70: mod_base = cm
  modified_base 71: mod_base = um
  modified_base 72: mod_base = um
  modified_base 73: mod_base = gm
  modified_base 74: mod_base = OTHER; note = 2'-O-methyladenosine
  modified_base 75: mod_base = OTHER; note = 2'-O-methyladenosine
  modified_base 76: mod_base = OTHER; note = 2'-O-methyladenosine
  modified_base 77: mod_base = OTHER; note = 2'-O-methyladenosine
  modified_base 78: mod_base = OTHER; note = 2'-O-methyladenosine
  modified_base 79: mod_base = gm
  modified_base 80: mod_base = um
  modified_base 81: mod_base = gm
  modified_base 82: mod_base = gm
  modified_base 83: mod_base = cm
  modified_base 84: mod_base = OTHER; note = 2'-O-methyladenosine
  modified_base 85: mod_base = cm
  modified_base 86: mod_base = cm
  modified_base 87: mod_base = gm
  modified_base 88: mod_base = OTHER; note = 2'-O-methyladenosine
  modified_base 89: mod_base = gm
  modified_base 90: mod_base = um
  modified_base 91: mod_base = cm
  modified_base 92: mod_base = gm
  modified_base 93: mod_base = gm
  modified_base 94: mod_base = um
  modified_base 95: mod_base = gm
  modified_base 96: mod_base = cm
  modified_base 116: mod_base = OTHER; note = Phosphorothioate (PS) linkage
  modified_base 116: mod_base = cm
  modified_base 117: mod_base = OTHER; note = Phosphorothioate (PS) linkage
  modified_base 117: mod_base = OTHER; note = 2'-O-methyladenosine
  modified_base 118: mod_base = OTHER; note = Phosphorothioate (PS) linkage
  modified_base 118: mod_base = gm
  source 1..118: mol_type = other RNA
tagcgaactgagaagggccggttttagagctagaaatagcaagttaaaataaggctagtccgttatcaacttgaaaaagtggcaccgagtcggtgcacaataccccggcccttctcag

SEQ ID NO: 792 - RNA, 120 nt, synthetic construct
  modified_base 1: mod_base = OTHER; note = 2'-O-methyladenosine
  modified_base 2: mod_base = OTHER; note = Phosphorothioate (PS) linkage
  modified_base 2: mod_base = cm
  modified_base 3: mod_base = OTHER; note = Phosphorothioate (PS) linkage
  modified_base 3: mod_base = um
  modified_base 4: mod_base = OTHER; note = Phosphorothioate (PS) linkage
  modified_base 29: mod_base = gm
  modified_base 30: mod_base = cm
  modified_base 31: mod_base = um
  modified_base 32: mod_base = OTHER; note = 2'-O-methyladenosine
  modified_base 33: mod_base = gm
  modified_base 34: mod_base = OTHER; note = 2'-O-methyladenosine
  modified_base 35: mod_base = OTHER; note = 2'-O-methyladenosine
  modified_base 36: mod_base = OTHER; note = 2'-O-methyladenosine
  modified_base 37: mod_base = um
  modified_base 38: mod_base = OTHER; note = 2'-O-methyladenosine
  modified_base 39: mod_base = gm
  modified_base 40: mod_base = cm
  modified_base 68: mod_base = OTHER; note = 2'-O-methyladenosine
  modified_base 69: mod_base = OTHER; note = 2'-O-methyladenosine
  modified_base 70: mod_base = cm
  modified_base 71: mod_base = um
  modified_base 72: mod_base = um
  modified_base 73: mod_base = gm
  modified_base 74: mod_base = OTHER; note = 2'-O-methyladenosine
  modified_base 75: mod_base = OTHER; note = 2'-O-methyladenosine
  modified_base 76: mod_base = OTHER; note = 2'-O-methyladenosine
  modified_base 77: mod_base = OTHER; note = 2'-O-methyladenosine
  modified_base 78: mod_base = OTHER; note = 2'-O-methyladenosine
  modified_base 79: mod_base = gm
  modified_base 80: mod_base = um
  modified_base 81: mod_base = gm
  modified_base 82: mod_base = gm
  modified_base 83: mod_base = cm
  modified_base 84: mod_base = OTHER; note = 2'-O-methyladenosine
  modified_base 85: mod_base = cm
  modified_base 86: mod_base = cm
  modified_base 87: mod_base = gm
  modified_base 88: mod_base = OTHER; note = 2'-O-methyladenosine
  modified_base 89: mod_base = gm
  modified_base 90: mod_base = um
  modified_base 91: mod_base = cm
  modified_base 92: mod_base = gm
  modified_base 93: mod_base = gm
  modified_base 94: mod_base = um
  modified_base 95: mod_base = gm
  modified_base 96: mod_base = cm
  modified_base 118: mod_base = OTHER; note = Phosphorothioate (PS) linkage
  modified_base 118: mod_base = gm
  modified_base 119: mod_base = OTHER; note = Phosphorothioate (PS) linkage
  modified_base 119: mod_base = cm
  modified_base 120: mod_base = OTHER; note = Phosphorothioate (PS) linkage
  modified_base 120: mod_base = OTHER; note = 2'-O-methyladenosine
  source 1..120: mol_type = other RNA
actttgctgccacaatacctgttttagagctagaaatagcaagttaaaataaggctagtccgttatcaacttgaaaaagtggcaccgagtcggtgcgagaaggggcgaggtattgtggca

SEQ ID NO: 793 - RNA, 20 nt, synthetic construct
  source 1..20: mol_type = other RNA
tagcgaactgagaagggcca

SEQ ID NO: 794 - RNA, 20 nt, synthetic construct
  source 1..20: mol_type = other RNA
actttgctgccacaatacct

SEQ ID NO: 795 - DNA, 20 bp, synthetic construct
  source 1..20: mol_type = other DNA
tagcgaactgagaagggcca

SEQ ID NO: 796 - DNA, 20 bp, synthetic construct
  source 1..20: mol_type = other DNA
actttgctgccacaatacct

SEQ ID NO: 797 - RNA, 10 nt, synthetic construct
  source 1..10: mol_type = other RNA
aatacctcgg

SEQ ID NO: 798 - RNA, 12 nt, synthetic construct
  source 1..12: mol_type = other RNA
acaatacctcgg

SEQ ID NO: 799 - RNA, 14 nt, synthetic construct
  source 1..14: mol_type = other RNA
ccacaatacctcgg

SEQ ID NO: 800 - RNA, 11 nt, synthetic construct
  source 1..11: mol_type = other RNA
aagggccgagg

SEQ ID NO: 801 - RNA, 13 nt, synthetic construct
  source 1..13: mol_type = other RNA
agaagggccgagg

SEQ ID NO: 802 - RNA, 15 nt, synthetic construct
  source 1..15: mol_type = other RNA
tgagaagggccgagg

SEQ ID NO: 803 - RNA, 15 nt, synthetic construct
  source 1..15: mol_type = other RNA
cccttctcagttcgc

SEQ ID NO: 804 - RNA, 14 nt, synthetic construct
  source 1..14: mol_type = other RNA
cccttctcagttcg

SEQ ID NO: 805 - RNA, 13 nt, synthetic construct
  source 1..13: mol_type = other RNA
cccttctcagttc

SEQ ID NO: 806 - RNA, 12 nt, synthetic construct
  source 1..12: mol_type = other RNA
cccttctcagtt

SEQ ID NO: 807 - RNA, 11 nt, synthetic construct
  source 1..11: mol_type = other RNA
cccttctcagt

SEQ ID NO: 808 - RNA, 10 nt, synthetic construct
  source 1..10: mol_type = other RNA
cccttctcag

SEQ ID NO: 809 - RNA, 15 nt, synthetic construct
  source 1..15: mol_type = other RNA
tattgtggcagcaaa

SEQ ID NO: 810 - RNA, 14 nt, synthetic construct
  source 1..14: mol_type = other RNA
tattgtggcagcaa

SEQ ID NO: 811 - RNA, 13 nt, synthetic construct
  source 1..13: mol_type = other RNA
tattgtggcagca

SEQ ID NO: 812 - RNA, 12 nt, synthetic construct
  source 1..12: mol_type = other RNA
tattgtggcagc

SEQ ID NO: 813 - RNA, 11 nt, synthetic construct
  source 1..11: mol_type = other RNA
tattgtggcag

SEQ ID NO: 814 - RNA, 10 nt, synthetic construct
  source 1..10: mol_type = other RNA
tattgtggca

SEQ ID NO: 815 - RNA, 20 nt, synthetic construct
  source 1..20: mol_type = other RNA
aaggctgtgctgaccatcga

SEQ ID NO: 816 - RNA, 20 nt, synthetic construct
  source 1..20: mol_type = other RNA
ctgtgctgaccatcgacaag

SEQ ID NO: 817 - DNA, 20 bp, synthetic construct
  source 1..20: mol_type = other DNA
aaggctgtgctgaccatcga

SEQ ID NO: 818 - DNA, 20 bp, synthetic construct
  source 1..20: mol_type = other DNA
ctgtgctgaccatcgacaag

SEQ ID NO: 819 - RNA, 10 nt, synthetic construct
  source 1..10: mol_type = other RNA
tttctcgtcg

SEQ ID NO: 820 - RNA, 12 nt, synthetic construct
  source 1..12: mol_type = other RNA
cctttctcgtcg

SEQ ID NO: 821 - RNA, 14 nt, synthetic construct
  source 1..14: mol_type = other RNA
tccctttctcgtcg

SEQ ID NO: 822 - RNA, 16 nt, synthetic construct
  source 1..16: mol_type = other RNA
agtccctttctcgtcg

SEQ ID NO: 823 - RNA, 10 nt, synthetic construct
  source 1..10: mol_type = other RNA
tccctttctc

SEQ ID NO: 824 - RNA, 12 nt, synthetic construct
  source 1..12: mol_type = other RNA
agtccctttctc

SEQ ID NO: 825 - RNA, 12 nt, synthetic construct
  source 1..12: mol_type = other RNA
atggtcagcaca

SEQ ID NO: 826 - RNA, 11 nt, synthetic construct
  source 1..11: mol_type = other RNA
atggtcagcac

SEQ ID NO: 827 - RNA, 10 nt, synthetic construct
  source 1..10: mol_type = other RNA
atggtcagca

SEQ ID NO: 828 - RNA, 12 nt, synthetic construct
  source 1..12: mol_type = other RNA
gtcgatggtcag

SEQ ID NO: 829 - RNA, 11 nt, synthetic construct
  source 1..11: mol_type = other RNA
gtcgatggtca

SEQ ID NO: 830 - RNA, 10 nt, synthetic construct
  source 1..10: mol_type = other RNA
gtcgatggtc

SEQ ID NO: 831 - RNA, 20 nt, synthetic construct
  source 1..20: mol_type = other RNA
ttacaccttacgaggccact

SEQ ID NO: 832 - RNA, 20 nt, synthetic construct
  source 1..20: mol_type = other RNA
taagtaatttacaccttacg

SEQ ID NO: 833 - RNA, 20 nt, synthetic construct
  source 1..20: mol_type = other RNA
tacccagcagcttaagattt

SEQ ID NO: 834 - RNA, 20 nt, synthetic construct
  source 1..20: mol_type = other RNA
cacccaaaggattgaggtct

SEQ ID NO: 835 - RNA, 20 nt, synthetic construct
  source 1..20: mol_type = other RNA
cccatacacccaaaggattg

SEQ ID NO: 836 - RNA, 20 nt, synthetic construct
  source 1..20: mol_type = other RNA
gctacgacccatacacccaa

SEQ ID NO: 837 - RNA, 20 nt, synthetic construct
  source 1..20: mol_type = other RNA
aagcctgtggttttggtctt

SEQ ID NO: 838 - RNA, 20 nt, synthetic construct
  source 1..20: mol_type = other RNA
ttcactcaagcctgtggttt

SEQ ID NO: 839 - RNA, 20 nt, synthetic construct
  source 1..20: mol_type = other RNA
gtgcccttcactcaagcctg

SEQ ID NO: 840 - RNA, 20 nt, synthetic construct
  source 1..20: mol_type = other RNA
taagactacctttctccaaa

SEQ ID NO: 841 - RNA, 20 nt, synthetic construct
  source 1..20: mol_type = other RNA
ttacttcttttttaggaaca

SEQ ID NO: 842 - RNA, 20 nt, synthetic construct
  source 1..20: mol_type = other RNA
gggtcgtagcgaactgagaa

SEQ ID NO: 843 - RNA, 20 nt, synthetic construct
  source 1..20: mol_type = other RNA
tgtaaattacttactgttaa

SEQ ID NO: 844 - RNA, 20 nt, synthetic construct
  source 1..20: mol_type = other RNA
tggcattttacttctttttt

SEQ ID NO: 845 - RNA, 20 nt, synthetic construct
  source 1..20: mol_type = other RNA
tgggtcgtagcgaactgaga

SEQ ID NO: 846 - RNA, 20 nt, synthetic construct
  source 1..20: mol_type = other RNA
agaaaccgagtggcctcgta

SEQ ID NO: 847 - RNA, 20 nt, synthetic construct
  source 1..20: mol_type = other RNA
agtcttaagagagttctcag

SEQ ID NO: 848 - RNA, 20 nt, synthetic construct
  source 1..20: mol_type = other RNA
cctcaatcctttgggtgtat

SEQ ID NO: 849 - RNA, 20 nt, synthetic construct
  source 1..20: mol_type = other RNA
tcgattactgagaaaccgag

SEQ ID NO: 850 - RNA, 20 nt, synthetic construct
  source 1..20: mol_type = other RNA
gaagggcaccatttggagaa

SEQ ID NO: 851 - RNA, 20 nt, synthetic construct
  source 1..20: mol_type = other RNA
acctcaatcctttgggtgta

SEQ ID NO: 852 - RNA, 20 nt, synthetic construct
  source 1..20: mol_type = other RNA
cttgagtgaagggcaccatt

SEQ ID NO: 853 - RNA, 20 nt, synthetic construct
  source 1..20: mol_type = other RNA
gtccaagacctcaatccttt

SEQ ID NO: 854 - RNA, 20 nt, synthetic construct
  source 1..20: mol_type = other RNA
aaaccacaggcttgagtgaa

SEQ ID NO: 855 - RNA, 20 nt, synthetic construct
  source 1..20: mol_type = other RNA
tgtccaagacctcaatcctt

SEQ ID NO: 856 - RNA, 20 nt, synthetic construct
  source 1..20: mol_type = other RNA
aaaaccacaggcttgagtga

SEQ ID NO: 857 - RNA, 20 nt, synthetic construct
  source 1..20: mol_type = other RNA
agccaaaatcttaagctgct

SEQ ID NO: 858 - RNA, 20 nt, synthetic construct
  source 1..20: mol_type = other RNA
gttcctaagaccaaaaccac

SEQ ID NO: 859 - RNA, 20 nt, synthetic construct
  source 1..20: mol_type = other RNA
cagccaaaatcttaagctgc

SEQ ID NO: 860 - DNA, 20 bp, synthetic construct
  source 1..20: mol_type = other DNA
ttacaccttacgaggccact

SEQ ID NO: 861 - DNA, 20 bp, synthetic construct
  source 1..20: mol_type = other DNA
taagtaatttacaccttacg

SEQ ID NO: 862 - DNA, 20 bp, synthetic construct
  source 1..20: mol_type = other DNA
tacccagcagcttaagattt

SEQ ID NO: 863 - DNA, 20 bp, synthetic construct
  source 1..20: mol_type = other DNA
cacccaaaggattgaggtct

SEQ ID NO: 864 - DNA, 20 bp, synthetic construct
  source 1..20: mol_type = other DNA
cccatacacccaaaggattg

SEQ ID NO: 865 - DNA, 20 bp, synthetic construct
  source 1..20: mol_type = other DNA
gctacgacccatacacccaa

SEQ ID NO: 866 - DNA, 20 bp, synthetic construct
  source 1..20: mol_type = other DNA
aagcctgtggttttggtctt

SEQ ID NO: 867 - DNA, 20 bp, synthetic construct
  source 1..20: mol_type = other DNA
ttcactcaagcctgtggttt

SEQ ID NO: 868 - DNA, 20 bp, synthetic construct
  source 1..20: mol_type = other DNA
gtgcccttcactcaagcctg

SEQ ID NO: 869 - DNA, 20 bp, synthetic construct
  source 1..20: mol_type = other DNA
taagactacctttctccaaa

SEQ ID NO: 870 - DNA, 20 bp, synthetic construct
  source 1..20: mol_type = other DNA
ttacttcttttttaggaaca

SEQ ID NO: 871 - DNA, 20 bp, synthetic construct
  source 1..20: mol_type = other DNA
gggtcgtagcgaactgagaa

SEQ ID NO: 872 - DNA, 20 bp, synthetic construct
  source 1..20: mol_type = other DNA
tgtaaattacttactgttaa

SEQ ID NO: 873 - DNA, 20 bp, synthetic construct
  source 1..20: mol_type = other DNA
tggcattttacttctttttt

SEQ ID NO: 874 - DNA, 20 bp, synthetic construct
  source 1..20: mol_type = other DNA
tgggtcgtagcgaactgaga

SEQ ID NO: 875 - DNA, 20 bp, synthetic construct
  source 1..20: mol_type = other DNA
agaaaccgagtggcctcgta

SEQ ID NO: 876 - DNA, 20 bp, synthetic construct
  source 1..20: mol_type = other DNA
agtcttaagagagttctcag

SEQ ID NO: 877 - DNA, 20 bp, synthetic construct
  source 1..20: mol_type = other DNA
cctcaatcctttgggtgtat

SEQ ID NO: 878 - DNA, 20 bp, synthetic construct
  source 1..20: mol_type = other DNA
tcgattactgagaaaccgag

SEQ ID NO: 879 - DNA, 20 bp, synthetic construct
  source 1..20: mol_type = other DNA
gaagggcaccatttggagaa

SEQ ID NO: 880 - DNA, 20 bp, synthetic construct
  source 1..20: mol_type = other DNA
acctcaatcctttgggtgta

SEQ ID NO: 881 - DNA, 20 bp, synthetic construct
  source 1..20: mol_type = other DNA
cttgagtgaagggcaccatt

SEQ ID NO: 882 - DNA, 20 bp, synthetic construct
  source 1..20: mol_type = other DNA
gtccaagacctcaatccttt

SEQ ID NO: 883 - DNA, 20 bp, synthetic construct
  source 1..20: mol_type = other DNA
aaaccacaggcttgagtgaa

SEQ ID NO: 884 - DNA, 20 bp, synthetic construct
  source 1..20: mol_type = other DNA
tgtccaagacctcaatcctt

SEQ ID NO: 885 - DNA, 20 bp, synthetic construct
  source 1..20: mol_type = other DNA
aaaaccacaggcttgagtga

SEQ ID NO: 886 - DNA, 20 bp, synthetic construct
  source 1..20: mol_type = other DNA
agccaaaatcttaagctgct

SEQ ID NO: 887 - DNA, 20 bp, synthetic construct
  source 1..20: mol_type = other DNA
gttcctaagaccaaaaccac

SEQ ID NO: 888 - DNA, 20 bp, synthetic construct
  source 1..20: mol_type = other DNA
cagccaaaatcttaagctgc

SEQ ID NO: 889 - RNA, 10 nt, synthetic construct
  source 1..10: mol_type = other RNA
gttttaaaac

SEQ ID NO: 890-893 - skipped (4 entries)

SEQ ID NO: 894 - RNA, 53 nt, synthetic construct
  source 1..53: mol_type = other RNA
gtttttgtactccgaaaggaagctacaaagataaggctttatgccgaaatcaa

SEQ ID NO: 895 - RNA, 53 nt, synthetic construct
  source 1..53: mol_type = other RNA
gtttttgtactccgaaaggaagctacaaagataaggcttcatgccgaaatcac

SEQ ID NO: 896 - RNA, 53 nt, synthetic construct
  source 1..53: mol_type = other RNA
gtttttgtactccgaaaggaagctacaaagataaggcttcatgccgaaatcat

SEQ ID NO: 897 - RNA, 53 nt, synthetic construct; identical to SEQ ID NO: 700
  modified_base 5: mod_base = um
  modified_base 6: mod_base = um
  modified_base 7: mod_base = gm
  modified_base 8: mod_base = um
  modified_base 9: mod_base = OTHER; note = 2'-O-methyladenosine
  modified_base 12: mod_base = cm
  modified_base 13: mod_base = um
  modified_base 14: mod_base = gm
  modified_base 15: mod_base = OTHER; note = 2'-O-methyladenosine
  modified_base 16: mod_base = OTHER; note = 2'-O-methyladenosine
  modified_base 17: mod_base = OTHER; note = 2'-O-methyladenosine
  modified_base 18: mod_base = OTHER; note = 2'-O-methyladenosine
  modified_base 19: mod_base = gm
  modified_base 20: mod_base = OTHER; note = 2'-O-methyladenosine
  modified_base 21: mod_base = OTHER; note = 2'-O-methyladenosine
  modified_base 29: mod_base = OTHER; note = 2'-O-methyladenosine
  modified_base 37: mod_base = cm
  modified_base 38: mod_base = um
  modified_base 40: mod_base = cm
  modified_base 50: mod_base = um
  modified_base 52: mod_base = OTHER; note = 2'-O-methyladenosine
  modified_base 53: mod_base = OTHER; note = 2'-O-methyladenosine
  source 1..53: mol_type = other RNA

SEQ ID NO: 898 - RNA, 53 nt, synthetic construct; identical to SEQ ID NO: 700
  modified_base 5: mod_base = um
  modified_base 6: mod_base = um
  modified_base 7: mod_base = gm
  modified_base 8: mod_base = um
  modified_base 9: mod_base = OTHER; note = 2'-O-methyladenosine
  modified_base 12: mod_base = cm
  modified_base 13: mod_base = um
  modified_base 14: mod_base = gm
  modified_base 15: mod_base = OTHER; note = 2'-O-methyladenosine
  modified_base 16: mod_base = OTHER; note = 2'-O-methyladenosine
  modified_base 17: mod_base = OTHER; note = 2'-O-methyladenosine
  modified_base 18: mod_base = OTHER; note = 2'-O-methyladenosine
  modified_base 19: mod_base = gm
  modified_base 20: mod_base = OTHER; note = 2'-O-methyladenosine
  modified_base 21: mod_base = OTHER; note = 2'-O-methyladenosine
  modified_base 52: mod_base = OTHER; note = 2'-O-methyladenosine
  modified_base 53: mod_base = OTHER; note = 2'-O-methyladenosine
  source 1..53: mol_type = other RNA

SEQ ID NO: 899 - protein, 425 aa, synthetic construct
MNNDDYPWFRKRGYLHFDEPVSLKKAVKYVSSPEKIIKHSFLPFLSFKVKSFKIKKDKSTKQLSKTEKLRPIAYSSHLDSHIYAFYAEYLTGHYELLIQENNLHENILAFRSLNKSNIEFAKRAFDTITEMGECSAVALDLSGFFDNLDHQILKHQWCKVIGTEALPQDHFAIYKSITRYSKVDKNRAYEILGISKNNPKYNRRKICTPVDFRNKIRKNGLIIVNNSQKGIPQGSPISALLSNIYMLDFDIEMRDYAQERGGHYYRYCDDMLFIVPTKYNKTLAGDVAQRIKHLKVELNTKKTEIRDFIYKDSTLVANMPLQYLGFIFDGSNILLRSSKLARYSERMKRGVRLAKATMDSKNRIRENKGEALKALFKKKLYARYSHIGRRNFLTEGYRAAKIMNSKAIKRQLKPLQKRLENEILK

SEQ ID NO: 900 - protein, 423 aa, synthetic construct
MSEPVEWFKRRRYLHFDLPTSEPAAVAIAGNPSIVARHAFYPFIQFKVKSRKVKWDKLTKRLVTTEKERPVSYASHVDSHIYACYAEILSQRYEDYLKEVGYQSSVLAFRKLGKSNIEFAKDAFDAIKEMGGADVIAADISDFFGSLNHKILKASWAKILKVNELPNDHYNVFKSLTRFTWVDKTNLYKALGISIYNPRGSGARICTPEIFRSVVRKLGLIQRNAADKGIPQGSPISALLSNIYMTDFDQALWTSIASMGGKYFRYCDDMLIIAPEGKGKEFMRLARELADLYALPLHPKKTEERFFTSSSGKLLADKPLQYLGFVFDGQQVSLRSAKLARYSDRMRRGVRLARVTMHARNTLRVERGESPRPLYKGKLYRRYSYLGRRNFVSEAIRAANILDEKAIKRQVKPLWKRLRSQMK

SEQ ID NO: 901 - protein, 442 aa, synthetic construct
MEKNQIKINKKKYYTKPYPHFDSRIPFNKKVIKYLSNSDNISSHSFYPFIHYTKKTRKYSKKNRTSTEKTREIYYASHFDGYVLKYYGELLNDKYNKYCRQNGIDEVSIAYRNNKHGKNNVHFASEVIRTISELGQAFIFVSDFTSYFDNLDHILLKERLLRVLGENSNELSRDWWTIYKNITRFSWVEKTDIEEYILKTKGVNLKKISKDQVDRYFSPDEFREFRKVIGIKKNKTIKGIPQGSPISAVLANVYAIDLDYELNQYALQFGGLYRRYSDDIILVFPLEELKDYKIEKLIEFITSIVEQNKIEMGTGKTNSLFYINNRIYSDSFLKKKGKLDYLGFVFDGENVKIREKSLYKYYHRMYKKIDSIRRAEAKKGRKVGRKKLYQLYSHLGRKYKGYGNFYSYAEKGHTIFNKIDNIESQIYKQVKKHWNKIHKRLK

SEQ ID NO: 902 - protein, 442 aa, synthetic construct
MEKNQIKINKKKYYTKPYPHFDSRIPFNKKVIKYLSNSDNISSHSFYPFIHYKKKTRKYSKKNRTSTEKTREIYYASHFDGYVLKYYGELLNDKYNKYCRQNGIDEVSIAYRNNKHGKNNVHFASEVIRTISELGQAFIFVSDFTSYFDNLDHILLKERLLRVLGENSNELSRDWWTIYKNITRFSWVEKTDIEEYILKTKGVNLKKISKDQVDRYFSPDEFREFRKVIGIKKNKTIKGIPQGSPISAVLANVYAIDLDYELNQYALQFGGLYRRYSDDIILVFPLEELKDYKIEKLIEFITSIVEQNKIEMGTGKTNSLFYINNRIYSDSFLKKKGKLDYLGFVFDGENVKIREKKLYKYYHRMYKKIDSIRRAEAKKGRKVGRKKLYQLYSHLGRKYKGYGNFYSEAEKGHTIFNKIDNIESQIYKQVKKHWNKIHKRLK

SEQ ID NO: 903 - protein, 459 aa, synthetic construct
MNRSNGPRRLHGLPSSSNVNWSKYKTRKYIHFDERVKIEHLKANIQDPSWVASYAFLPSIHFELILKKYITVKKADNSKVKKKEKKIRGIYYAAHKDSFIYKYYGDLLNNAYNEYASLTGIDAIAVAYRNNKQGKNNIDFAFEVFDFLLRQDEAIVIALDFKSFFDKIDHKSLKQKMKRVLCVEELPKDWYKIYKNITRYSYVEKSDIDEFLLDKYGKKRFKKVRSSLAKIMEPAEFREFKKGRLHVNLDDYGIPQGSGMSAVCSNVHLIDFDKEVLEWAKQKHEEALYKRYCDDLIIIIPVVNATVELLEDLKNELMDHIEKYRSEGLIIQEKKTELRIYKDKTIYNGKLRISSLDYLGFVVNKNIIRIREKSLFKYYSRAYKKAKISKRIGKATNRPGPKRKLYDLYTHLGHKYLNYGNFIAYAKKAHKLMRKLPCESHIKKQIKRHWRKIHKRLGD

SEQ ID NO: 904 - protein, 459 aa, synthetic construct
MNRSNGPRRLHGLPSSSNVNWSKYKTRKYIHFDERVKIEHLKANIQDPSWVASYAFLPSIHFKLILKKYITVKKADNSKVKKKEKKIRGIYYAAHKDSFIYKYYGDLLNNAYNEYASLTGIDAIAVAYRNNKQGKNNIDFAFEVFDFLLRQDEAIVIALDFKSFFDKIDHKSLKQKMKRVLCVEELPKDWYKIYKNITRYSYVEKSDIDEFLLDKYGKKRFKKVRSSLAKIMEPAEFREFKKGRLHVNLDDYGIPQGSGMSAVCSNVHLIDFDKEVLEWAKQKHEEALYKRYCDDLIIIIPVVNATVELLEDLKNELMDHIEKYRSEGLIIQEKKTELRIYKDKTIYNGKLRISSLDYLGFVVNKNIIRIREKKLFKYYSRAYKKAKISKRIGKATNRPGPKRKLYDLYTHLGHKYLNYGNFIAEAKKAHKLMRKLPCESHIKKQIKRHWRKIHKRLGD

SEQ ID NO: 905 - protein, 438 aa, synthetic construct
MSKIKINYEKYHIKPFPHFDQRIKVNKKVKENLQNPFYIAAHSFYPFIHYKKISYKFKNGTLSSPKERDIFYSGHMDGYIYKHYGEILNHKYNNTCIGKGIDHVSLAYRNNKMGKSNIHFAAEVINFISEQQQAFIFVSDFSSYFDSLDHAILKEKLIEVLEEQDKLSKDWWNVFKHITRYNWVEKEEVISDLECTKEKIARDKKSRERYYTPAEFREFRKRVNIKSNDTGVGIPQGTAISAVLANVYAIDLDQKLNQYALKYGGIYRRYSDDIIMVLPMTSDGQDPSNDHVSFIKSVVKRNKVTMGDSKTSVLYYANNNIYEDYQRKRESKMDYLGFSFDGMTVKIREKSLFKYYHRTYKKINSINWASVKKEKKVGRKKLYLLYSHLGRNYKGHGNFISYCKKAHAVFEGNKKIESLINQQIKRHWKKIQKRLVDV

SEQ ID NO: 906 - protein, 438 aa, synthetic construct
MSKIKINYEKYHIKPFPHFDQRIKVNKKVKENLQNPFYIAAHSFYPFIHYKKISYKFKNGTLSSPKERDIFYSGHMDGYIYKHYGEILNHKYNNTCIGKGIDHVSLAYRNNKMGKSNIHFAAEVINFISEQQQAFIFVSDFSSYFDSLDHAILKEKLIEVLEEQDKLSKDWWNVFKHITRYNWVEKEEVISDLECTKEKIARDKKSRERYYTPAEFREFRKRVNIKSNDTGVGIPQGTAISAVLANVYAIDLDQKLNQYALKYGGIYRRYSDDIIMVLPMTSDGQDPSNDHVSFIKSVVKRNKVTMGDSKTSVLYYANNNIYEDYQRKRESKMDYLGFIFDGMTVKIREKKLFKYYHRTYKKINSINWASVKKEKKVGRKKLYLLYSHLGRNYKGHGNFISECKKAHAVFEGNKKIESLINQQIKRHWKKIQKRLVDV

SEQ ID NO: 907 - protein, 492 aa, synthetic construct
QLEDEHRLFENNVRGDERIAEWLQQYPKAWAETAGMGLATERPPVIVELKSTATPIAVRQYPMAKEAWRGIKIHIQRLLHLGVLVKCHSPWNTPLLPVKKPGTNDYRPVQDLREVNKRVQDIHPTVPNPYNLLSSIPPSHVWYSVLDLKDAFFCLRLHPASQNIFAFEWRDPDSGMTGQLTWTRLPQGFKNSPTIFNEALHQDLAAFRADHPQVTLLQYVDDLLLAGATKEDCEAGTRALLLELSRLGYRASAKKAQICQRRVTYLGYALEGGKRWLTEARKSTVTQIPRPQTPRQVREFLGKAGFCRLFIPGFATLAEPLYPLTKPGNPFEWGETHQKAFDNIKRALLSAPALALPDVAKPFTLFIDERKGVARGVLTQTLGPWKRPVAYLSKRLDPVARGWPGCLRAIAATALLVRDADKLTLGQKLTVVAPHTLESIIRQPPDRWMSNARMTHYQSLLLNEDRVHFGAPVVLNPATLLPEVDPEGKEVL

SEQ ID NO: 908 - protein, 492 aa, synthetic construct
RLEDEHRLFQPTGKTPADLDHWLREFPRAWAETAGAGEATQQPPVIIELKAAATPIAVRQYPMPREAREGIQPHITRLLGLGFLVKCQSPWNTPLLPVKKPGTNDYRPVQDLREVNKRVQDIHPTVPNPYNLLSTIPAGHIWYTVLDLKDAFFCLKLHPESQKLFAFEWKDLESGDSGQLTWTRLPQGFKNSPTIFNEALHKDLAIFRAEHPQVTLLQYVDDLLLAGATEEECLAGTRGLLSELSKLGYRASAKKAQICQKRVTYLGYALEGGQRWLTEERKTTVLQIPTPQTPRQVREFLGKAGFCRLFIPGFATMAEPLYPLTKPGQPFHWGKEHQKAFLDIKEALLSAPALALPDVEKPFTLYVDERKGVARGVLTQALGPWKRPVAYLSKRLDPVARGWPACLRAIAATALLVKDTDKLTLGQKLTVIAPHALESIIRQPPDRWISNARVTHYQSLLLDEGRITFGAPVTLNPATLLPTEGEEGQEVL

SEQ ID NO: 909 - protein, 492 aa, synthetic construct
TLNIEDEYRLHETSKEPDVSLGSTWLSDFPQAWAETGGMGLAVRQAPLIIPLKATSTPVSIKQYPMSQEARLGIKPHIQRLLDQGILVPCQSPWNTPLLPVKKPGTNDYRPVQDLREVNKRVEDIHPTVPNPYNLLSGLPPSHQWYTVLDLKDAFFCLRLHPTSQPLFAFEWRDPEMGISGQLTWTRLPQGFKNSPTLFNEALHRDLADFRIQHPDLILLQYVDDLLLAATSELDCQQGTRALLQTLGNLGYRASAKKAQICQKQVKYLGYLLKEGQRWLTEARKETVMGQPTPKTPRQLREFLGKAGFCRLFIPGFAEMAAPLYPLTKPGTLFNWGPDQQKAYQEIKQALLTAPALGLPDLTKPFELFVDEKQGYAKGVLTQKLGPWRRPVAYLSKKLDPVAAGWPPCLRMVAAIAVLTKDAGKLTMGQPLVILAPHAVEALVKQPPDRWLSNARMTHYQALLLDTDRVQFGPVVALNPATLLPLPEEGLQ

SEQ ID NO: 910 - RNA, 70 nt, synthetic construct
  source 1..70: mol_type = other RNA
agcaaaaatcaaaatcaatcatcatcacaacatcaacaatcaatcatcaacacatcatcaagacaccacc

SEQ ID NO: 911 - RNA, 50 nt, synthetic construct
  source 1..50: mol_type = other RNA
agcatcacaacatcaacaatcaatcatcaacacatcatcaagacaccacc

SEQ ID NO: 912 - RNA, 50 nt, synthetic construct
  source 1..50: mol_type = other RNA
agatttgcttctgacacaactgtgttcactagcaacctcaaacagacacc

SEQ ID NO: 913 - RNA, 50 nt, synthetic construct
  source 1..50: mol_type = other RNA
aggtccgttatattatttatcttgcagatcaaacttcagagaggagggcc

SEQ ID NO: 914 - RNA, 50 nt, synthetic construct
  source 1..50: mol_type = other RNA
agggaacagtggagcacaatagttgtcacaaacgcgtgacctgtacctta

SEQ ID NO: 915 - RNA, 50 nt, synthetic construct
  source 1..50: mol_type = other RNA
agagaaagagtttcgagaaagttgcgatacacaccgacctaatccgtgtc

SEQ ID NO: 916 - RNA, 50 nt, synthetic construct
  source 1..50: mol_type = other RNA
agactgagtagcgttgtcgattgctgttttcataaccgtaccgagcctgc

SEQ ID NO: 917 - RNA, 50 nt, synthetic construct
  source 1..50: mol_type = other RNA
agtggagagcgcaatccagtttccttagcaaagcatatcacccttcggct

SEQ ID NO: 918 - RNA, 50 nt, synthetic construct
  source 1..50: mol_type = other RNA
agttatttgcgataaacagtagggagacaattgacctgcacagcgtggcc

SEQ ID NO: 919 - RNA, 50 nt, synthetic construct
  source 1..50: mol_type = other RNA
agcccttacacgaattctcgaaaatcgtgcttcaagaaacgtacaacggc

SEQ ID NO: 920 - RNA, 50 nt, synthetic construct
  source 1..50: mol_type = other RNA
agccttcgcacaatactcgcgcgtcctaagcaaaatcggaacaagtactg

SEQ ID NO: 921 - RNA, 50 nt, synthetic construct
  source 1..50: mol_type = other RNA
aggcgaagtcttcgactaccactaccctcgccgtcgcggtctttgctgtc

SEQ ID NO: 922 - RNA, 50 nt, synthetic construct
  source 1..50: mol_type = other RNA
aggccgagtcattatcatacttggttcaatctattgaacgaagtattgct

SEQ ID NO: 923 - RNA, 50 nt, synthetic construct
  source 1..50: mol_type = other RNA
agggaccaagagttcgatacctcatcgaactgcgagtcataagcagggcc

SEQ ID NO: 924 - RNA, 50 nt, synthetic construct
  source 1..50: mol_type = other RNA
agggatttaccgagaatctagttacagaacaacctcttcctaaaagggcc

SEQ ID NO: 925 - RNA, 50 nt, synthetic construct
  source 1..50: mol_type = other RNA
aggttgcactttaccctcccttcccgtgggaacgcattgcgaaaatcgca

SEQ ID NO: 926 - RNA, 50 nt, synthetic construct
  source 1..50: mol_type = other RNA
agccggaacacggtatctgtgcgttcgtaatcagtactaactctatccag

SEQ ID NO: 927 - RNA, 50 nt, synthetic construct
  source 1..50: mol_type = other RNA
agtggagattcgggatctgcaaatcaccgataaaacatcccttcgggagg

SEQ ID NO: 928 - RNA, 50 nt, synthetic construct
  source 1..50: mol_type = other RNA
agaacgcgagttccttcttcactggtacctcacacccaatagcaattcca

SEQ ID NO: 929 - RNA, 50 nt, synthetic construct
  source 1..50: mol_type = other RNA
agacggtagacaaggaatcgaaagactgctcctcactgcttacgtttacc

SEQ ID NO: 930 - RNA, 50 nt, synthetic construct
  source 1..50: mol_type = other RNA
aggtggtcttcttgttgctacaggaacccacggacttattcgatagcgac

SEQ ID NO: 931 - RNA, 50 nt, synthetic construct
  source 1..50: mol_type = other RNA
agtgagtccccgtcaaccgtatcgggagggcgatcgacaattctctacca

SEQ ID NO: 932 - RNA, 50 nt, synthetic construct
  source 1..50: mol_type = other RNA
agtgccgcattgtcttcttgtgttcgcttgccgccgacgaacaactggaa

SEQ ID NO: 933 - RNA, 50 nt, synthetic construct
  source 1..50: mol_type = other RNA
agaaggttccgcgacgctcccgccttctatccccttctttaaagtcgctg

SEQ ID NO: 934 - RNA, 54 nt, synthetic construct
  source 1..54: mol_type = other RNA
aaacggacagccgacggaagcgagttcgagtcaccaaagaagaagcggaaagtc

SEQ ID NO: 935 - RNA, 4101 nt, synthetic construct
  source 1..4101: mol_type = other RNA
gacaagaagtacagcatcggcctggacatcggcaccaactctgtgggctgggccgtgatcaccgacgagtacaaggtgcccagcaagaaattcaaggtgctgggcaacaccgaccggcacagcatcaagaagaacctgatcggagccctgctgttcgacagcggcgaaacagccgaggccacccggctgaagagaaccgccagaagaagatacaccagacggaagaaccggatctgctatctgcaagagatcttcagcaacgagatggccaaggtggacgacagcttcttccacagactggaagagtccttcctggtggaagaggataagaagcacgagcggcaccccatcttcggcaacatcgtggacgaggtggcctaccacgagaagtaccccaccatctaccacctgagaaagaaactggtggacagcaccgacaaggccgacctgcggctgatctatctggccctggcccacatgatcaagttccggggccacttcctgatcgagggcgacctgaaccccgacaacagcgacgtggacaagctgttcatccagctggtgcagacctacaaccagctgttcgaggaaaaccccatcaacgccagcggcgtggacgccaaggccatcctgtctgccagactgagcaagagcagaaagctggaaaatctgatcgcccagctgcccggcgagaagaagaatggcctgttcggaaacctgattgccctgagcctgggcctgacccccaacttcaagagcaacttcgacctggccgaggatgccaaactgcagctgagcaaggacacctacgacgacgacctggacaacctgctggcccagatcggcgaccagtacgccgacctgtttctggccgccaagaacctgtccgacgccatcctgctgagcgacatcctgagagtgaacaccgagatcaccaaggcccccctgagcgcctctatgatcaagagatacgacgagcaccaccaggacctgaccctgctgaaagctctcgtgcggcagcagctgcctgagaagtacaaagagattttcttcgaccagagcaagaacggctacgccggctacattgacggcggagccagccaggaagagttctacaagttcatcaagcccatcctggaaaagatggacggcaccgaggaactgctcgtgaagctgaagagagaggacctgctgcggaagcagcggaccttcgacaacggcagcatcccccaccagatccacctgggagagctgcacgccattctgcggcggcaggaagatttttacccattcctgaaggacaaccgggaaaagatcgagaagatcctgaccttccgcatcccctactacgtgggccctctggccaggggaaacagcagattcgcctggatgaccagaaagagcgaggaaaccatcaccccctggaacttcgaggaagtggtggacaagggcgcttccgcccagagcttcatcgagcggatgaccaacttcgataagaacctgcccaacgagaaggtgctgcccaagcacagcctgctgtacgagtacttcaccgtgtataacgagctgaccaaagtgaaatacgtgaccgagggaatgagaaagcccgccttcctgagcggcgagcagaaaaaggccatcgtggacctgctgttcaagaccaaccggaaagtgaccgtgaagcagctgaaagaggactacttcaagaaaatcgagtgcttcgactccgtggaaatctccggcgtggaagatcggttcaacgcctccctgggcacataccacgatctgctgaaaattatcaaggacaaggacttcctggacaatgaggaaaacgaggacattctggaagatatcgtgctgaccctgacactgtttgaggacagagagatgatcgaggaacggctgaaaacctatgcccacctgttcgacgacaaagtgatgaagcagctgaagcggcggagatacaccggctggggcaggctgagccggaagctgatcaacggcatccgggacaagcagtccggcaagacaatcctggatttcctgaagtccgacggcttcgccaacagaaacttcatgcagctgatccacgacgacagcctgacctttaaagaggacatccagaaagcccaggtgtccggccagggcgatagcctgcacgagcacattgccaatctggccggcagccccgccattaagaagggcatcctgcagacagtgaaggtggtggacgagctcgtgaaagtgatgggccggcacaagcccgagaacatcgtgatcgaaatggccagagagaaccagaccacccagaagggacagaagaacagccgcgagagaatgaagcggatcgaagagggcatcaaagagctgggcagccagatcctgaaagaacaccccgtggaaaacacccagctgcagaacgagaagctgtacctgtactacctgcagaatgggcgggatatgtacgtggaccaggaactggacatcaaccggctgtccgactacgatgtggacgctatcgtgcctcagagctttctgaaggacgactccatcgacaacaaggtgctgaccagaagcgacaagaaccggggcaagagcgacaacgtgccctccgaagaggtcgtgaagaagatgaagaactactggcggcagctgctgaacgccaagctgattacccagagaaagttcgacaatctgaccaaggccgagagaggcggcctgagcgaactggataaggccggcttcatcaagagacagctggtggaaacccggcagatcacaaagcacgtggcacagatcctggactcccggatgaacactaagtacgacgagaatgacaagctgatccgggaagtgaaagtgatcaccctgaagtccaagctggtgtccgatttccggaaggatttccagttttacaaagtgcgcgagatcaacaactaccaccacgcccacgacgcctacctgaacgccgtcgtgggaaccgccctgatcaaaaagtaccctaagctggaaagcgagttcgtgtacggcgactacaaggtgtacgacgtgcggaagatgatcgccaagagcgagcaggaaatcggcaaggctaccgccaagtacttcttctacagcaacatcatgaactttttcaagaccgagattaccctggccaacggcgagatccggaagcggcctctgatcgagacaaacggcgaaaccggggagatcgtgtgggataagggccgggattttgccaccgtgcggaaagtgctgagcatgccccaagtgaatatcgtgaaaaagaccgaggtgcagacaggcggcttcagcaaagagtctatcctgcccaagaggaacagcgataagctgatcgccagaaagaaggactgggaccctaagaagtacggcggcttcgacagccccaccgtggcctattctgtgctggtggtggccaaagtggaaaagggcaagtccaagaaactgaagagtgtgaaagagctgctggggatcaccatcatggaaagaagcagcttcgagaagaatcccatcgactttctggaagccaagggctacaaagaagtgaaaaaggacctgatcatcaagctgcctaagtactccctgttcgagctggaaaacggccggaagagaatgctggcctctgccggcgaactgcagaagggaaacgaactggccctgccctccaaatatgtgaacttcctgtacctggccagccactatgagaagctgaagggctcccccgaggataatgagcagaaacagctgtttgtggaacagcacaagcactacctggacgagatcatcgagcagatcagcgagttctccaagagagtgatcctggccgacgctaatctggacaaagtgctgtccgcctacaacaagcaccgggataagcccatcagagagcaggccgagaatatcatccacctgtttaccctgaccaatctgggagcccctgccgccttcaagtactttgacaccaccatcgaccggaagaggtacaccagcaccaaagaggtgctggacgccaccctgatccaccagagcatcaccggcctgtacgagacacggatcgacctgtctcagctgggaggtgac

SEQ ID NO: 936 - RNA, 102 nt, synthetic construct
  source 1..102: mol_type = other RNA
tccggcggaagctctggtggcagcaagcggaccgccgacggctctgaattcgagagccctaagaagaaaagaaaggtgagcggaggctctagcggcggaagc

SEQ ID NO: 937 - RNA, 2007 nt, synthetic construct
  source 1..2007: mol_type = other RNA
cagctggaggacgagcacagactgtttgaaaacaacgtgcggggcgatgagagaatcgctgagtggctgcagcagtatcctaaggcttgggccgaaaccgccggaatgggactggcaacagagcggccaccagtcatcgtggaactgaaatccacagctacacctatcgccgtgcggcagtaccccatggccaaggaggcctggagaggcatcaagatccacatccagagactgctgcacctcggggtgctggtgaaatgccactctccttggaacacccctctgctgcccgtgaagaaacctgggacaaacgactaccggcctgtgcaagatctgagggaagtgaacaaaagagtgcaggacatccatcccaccgttcctaacccctacaacctgctgtctagcatccccccgagccacgtgtggtacagcgtgctggacctgaaggacgccttcttctgcctgagactgcaccctgcttctcagaacatcttcgcctttgagtggcgggaccccgattctggcatgaccggccagctgacctggaccagactgcctcagggattcaagaacagcccaactatctttaacgaggccctccaccaggacctggccgccttcagagctgaccacccccaggtgaccctgctgcagtacgtggacgacctgctgctggccggcgccacaaaggaagattgcgaggccggaaccagagcactgctgctggaactgagccgtctgggctatagagccagcgccaagaaggcccagatctgccagcggagagtgacataccttggatacgccctggaaggcggcaagcggtggctgaccgaggccagaaagagcaccgtgacccaaatcccccggccccagacccctagacaagtgcgggaattcctgggaaaggccggcttctgccggctgttcatacctggcttcgcaacactggccgaacccctgtaccccctgaccaagcccggcaatccattcgagtggggcgaaacccaccagaaggcctttgataacatcaagcgggccctgctcagcgcccctgccctcgccctgccagacgtggccaaacctttcaccctgttcattgacgaaagaaaaggcgtggccagaggcgttctgacacagaccctgggcccttggaagcggcctgtggcctacctgtctaagagactggaccctgtcgccagaggatggcctggttgtctgagagctatcgccgctaccgcccttctggtcagagatgctgataagctgacactgggccagaagctgaccgtggtggctcctcacaccttggagagcatcattagacaaccacctgatagatggatgagcaacgccagaatgacccactaccagagcctgctgctgaacgaggacagagtgcatttcggcgcccctgttgtgctgaatcccgctaccctgcttcctgaggtggaccccgagggcaaagaagtgctgcactcctgcagagatatcctggctgaagagacaggccctcgcaaggacctgaaggacagtcctctggcgggccctcagctgacctggttcacagacggcagcagctacctgtacgagggcaagcgcgtggccggcgccgccgtggtcgaccaggatcgcaccatctgggccagcagcctgcctgagggaacaagcgctcagaaagctgagctgatcgccctaacccaggccctgcggctggccgagggcaacagagccaatatctacaccgactctagatacgccttcgccacagcccacgtgcacggcgctatctacagacagaggggatggctgacctccgccggcaaggaaatcaagaacaagcaggaaatcctggatctgctggaagccgtgcacgcccctagagaagtggccatcatccactgtcctggccaccagaagggcaccagcgaggtggccatgggcaatagaaaggccgacgccgaggccagacaagccgctctgggcccccgggtgttcacactggcc

SEQ ID NO: 938 - RNA, 102 nt, synthetic construct
  source 1..102: mol_type = other RNA
tctggcggctcaaaaagaaccgccgacggcagcgaattcgagtctcccaagaagaagaggaaagtcggctctggccctgccgctaagagagtgaagctggac

SEQ ID NO: 939 - RNA, 6662 nt, synthetic construct
  source 1..6662: mol_type = other RNA
agggatttaccgagaatctagttacagaacaacctcttcctaaaagggccatgaaacggacagccgacggaagcgagttcgagtcaccaaagaagaagcggaaagtcgacaagaagtacagcatcggcctggacatcggcaccaactctgtgggctgggccgtgatcaccgacgagtacaaggtgcccagcaagaaattcaaggtgctgggcaacaccgaccggcacagcatcaagaagaacctgatcggagccctgctgttcgacagcggcgaaacagccgaggccacccggctgaagagaaccgccagaagaagatacaccagacggaagaaccggatctgctatctgcaagagatcttcagcaacgagatggccaaggtggacgacagcttcttccacagactggaagagtccttcctggtggaagaggataagaagcacgagcggcaccccatcttcggcaacatcgtggacgaggtggcctaccacgagaagtaccccaccatctaccacctgagaaagaaactggtggacagcaccgacaaggccgacctgcggctgatctatctggccctggcccacatgatcaagttccggggccacttcctgatcgagggcgacctgaaccccgacaacagcgacgtggacaagctgttcatccagctggtgcagacctacaaccagctgttcgaggaaaaccccatcaacgccagcggcgtggacgccaaggccatcctgtctgccagactgagcaagagcagaaagctggaaaatctgatcgcccagctgcccggcgagaagaagaatggcctgttcggaaacctgattgccctgagcctgggcctgacccccaacttcaagagcaacttcgacctggccgaggatgccaaactgcagctgagcaaggacacctacgacgacgacctggacaacctgctggcccagatcggcgaccagtacgccgacctgtttctggccgccaagaacctgtccgacgccatcctgctgagcgacatcctgagagtgaacaccgagatcaccaaggcccccctgagcgcctctatgatcaagagatacgacgagcaccaccaggacctgaccctgctgaaagctctcgtgcggcagcagctgcctgagaagtacaaagagattttcttcgaccagagcaagaacggctacgccggctacattgacggcggagccagccaggaagagttctacaagttcatcaagcccatcctggaaaagatggacggcaccgaggaactgctcgtgaagctgaagagagaggacctgctgcggaagcagcggaccttcgacaacggcagcatcccccaccagatccacctgggagagctgcacgccattctgcggcggcaggaagatttttacccattcctgaaggacaaccgggaaaagatcgagaagatcctgaccttccgcatcccctactacgtgggccctctggccaggggaaacagcagattcgcctggatgaccagaaagagcgaggaaaccatcaccccctggaacttcgaggaagtggtggacaagggcgcttccgcccagagcttcatcgagcggatgaccaacttcgataagaacctgcccaacgagaaggtgctgcccaagcacagcctgctgtacgagtacttcaccgtgtataacgagctgaccaaagtgaaatacgtgaccgagggaatgagaaagcccgccttcctgagcggcgagcagaaaaaggccatcgtggacctgctgttcaagaccaaccggaaagtgaccgtgaagcagctgaaagaggactacttcaagaaaatcgagtgcttcgactccgtggaaatctccggcgtggaagatcggttcaacgcctccctgggcacataccacgatctgctgaaaattatcaaggacaaggacttcctggacaatgaggaaaacgaggacattctggaagatatcgtgctgaccctgacactgtttgaggacagagagatgatcgaggaacggctgaaaacctatgcccacctgttcgacgacaaagtgatgaagcagctgaagcggcggagatacaccggctggggcaggctgagccggaagctgatcaacggcatccgggacaagcagtccggcaagacaatcctggatttcctgaagtccgacggcttcgccaacagaaacttcatgcagctgatccacgacgacagcctgacctttaaagaggacatccagaaagcccaggtgtccggccagggcgatagcctgcacgagcacattgccaatctggccggcagccccgccattaagaagggcatcctgcagacagtgaaggtggtggacgagctcgtgaaagtgatgggccggcacaagcccgagaacatcgtgatcgaaatggccagagagaaccagaccacccagaagggacagaagaacagccgcgagagaatgaagcggatcgaagagggcatcaaagagctgggcagccagatcctgaaagaacaccccgtggaaaacacccagctgcagaacgagaagctgtacctgtactacctgcagaatgggcgggatatgtacgtggaccaggaactggacatcaaccggctgtccgactacgatgtggacgctatcgtgcctcagagctttctgaaggacgactccatcgacaacaaggtgctgaccagaagcgacaagaaccggggcaagagcgacaacgtgccctccgaagaggtcgtgaagaagatgaagaactactggcggcagctgctgaacgccaagctgattacccagagaaagttcgacaatctgaccaaggccgagagaggcggcctgagcgaactggataaggccggcttcatcaagagacagctggtggaaacccggcagatcacaaagcacgtggcacagatcctggactcccggatgaacactaagtacgacgagaatgacaagctgatccgggaagtgaaagtgatcaccctgaagtccaagctggtgtccgatttccggaaggatttccagttttacaaagtgcgcgagatcaacaactaccaccacgcccacgacgcctacctgaacgccgtcgtgggaaccgccctgatcaaaaagtaccctaagctggaaagcgagttcgtgtacggcgactacaaggtgtacgacgtgcggaagatgatcgccaagagcgagcaggaaatcggcaaggctaccgccaagtacttcttctacagcaacatcatgaactttttcaagaccgagattaccctggccaacggcgagatccggaagcggcctctgatcgagacaaacggcgaaaccggggagatcgtgtgggataagggccgggattttgccaccgtgcggaaagtgctgagcatgccccaagtgaatatcgtgaaaaagaccgaggtgcagacaggcggcttcagcaaagagtctatcctgcccaagaggaacagcgataagctgatcgccagaaagaaggactgggaccctaagaagtacggcggcttcgacagccccaccgtggcctattctgtgctggtggtggccaaagtggaaaagggcaagtccaagaaactgaagagtgtgaaagagctgctggggatcaccatcatggaaagaagcagcttcgagaagaatcccatcgactttctggaagccaagggctacaaagaagtgaaaaaggacctgatcatcaagctgcctaagtactccctgttcgagctggaaaacggccggaagagaatgctggcctctgccggcgaactgcagaagggaaacgaactggccctgccctccaaatatgtgaacttcctgtacctggccagccactatgagaagctgaagggctcccccgaggataatgagcagaaacagctgtttgtggaacagcacaagcactacctggacgagatcatcgagcagatcagcgagttctccaagagagtgatcctggccgacgctaatctggacaaagtgctgtccgcctacaacaagcaccgggataagcccatcagagagcaggccgagaatatcatccacctgtttaccctgaccaatctgggagcccctgccgccttcaagtactttgacaccaccatcgaccggaagaggtacaccagcaccaaagaggtgctggacgccaccctgatccaccagagcatcaccggcctgtacgagacacggatcgacctgtctcagctgggaggtgactccggcggaagctctggtggcagcaagcggaccgccgacggctctgaattcgagagccctaagaagaaaagaaaggtgagcggaggctctagcggcggaagccagctggaggacgagcacagactgtttgaaaacaacgtgcggggcgatgagagaatcgctgagtggctgcagcagtatcctaaggcttgggccgaaaccgccggaatgggactggcaacagagcggccaccagtcatcgtggaactgaaatccacagctacacctatcgccgtgcggcagtaccccatggccaaggaggcctggagaggcatcaagatccacatccagagactgctgcacctcggggtgctggtgaaatgccactctccttggaacacccctctgctgcccgtgaagaaacctgggacaaacgactaccggcctgtgcaagatctgagggaagtgaacaaaagagtgcaggacatccatcccaccgttcctaacccctacaacctgctgtctagcatccccccgagccacgtgtggtacagcgtgctggacctgaaggacgccttcttctgcctgagactgcaccctgcttctcagaacatcttcgcctttgagtggcgggaccccgattctggcatgaccggccagctgacctggaccagactgcctcagggattcaagaacagcccaactatctttaacgaggccctccaccaggacctggccgccttcagagctgaccacccccaggtgaccctgctgcagtacgtggacgacctgctgctggccggcgccacaaaggaagattgcgaggccggaaccagagcactgctgctggaactgagccgtctgggctatagagccagcgccaagaaggcccagatctgccagcggagagtgacataccttggatacgccctggaaggcggcaagcggtggctgaccgaggccagaaagagcaccgtgacccaaatcccccggccccagacccctagacaagtgcgggaattcctgggaaaggccggcttctgccggctgttcatacctggcttcgcaacactggccgaacccctgtaccccctgaccaagcccggcaatccattcgagtggggcgaaacccaccagaaggcctttgataacatcaagcgggccctgctcagcgcccctgccctcgccctgccagacgtggccaaacctttcaccctgttcattgacgaaagaaaaggcgtggccagaggcgttctgacacagaccctgggcccttggaagcggcctgtggcctacctgtctaagagactggaccctgtcgccagaggatggcctggttgtctgagagctatcgccgctaccgcccttctggtcagagatgctgataagctgacactgggccagaagctgaccgtggtggctcctcacaccttggagagcatcattagacaaccacctgatagatggatgagcaacgccagaatgacccactaccagagcctgctgctgaacgaggacagagtgcatttcggcgcccctgttgtgctgaatcccgctaccctgcttcctgaggtggaccccgagggcaaagaagtgctgcactcctgcagagatatcctggctgaagagacaggccctcgcaaggacctgaaggacagtcctctggcgggccctcagctgacctggttcacagacggcagcagctacctgtacgagggcaagcgcgtggccggcgccgccgtggtcgaccaggatcgcaccatctgggccagcagcctgcctgagggaacaagcgctcagaaagctgagctgatcgccctaacccaggccctgcggctggccgagggcaacagagccaatatctacaccgactctagatacgccttcgccacagcccacgtgcacggcgctatctacagacagaggggatggctgacctccgccggcaaggaaatcaagaacaagcaggaaatcctggatctgctggaagccgtgcacgcccctagagaagtggccatcatccactgtcctggccaccagaagggcaccagcgaggtggccatgggcaatagaaaggccgacgccgaggccagacaagccgctctgggcccccgggtgttcacactggcctctggcggctcaaaaagaaccgccgacggcagcgaattcgagtctcccaagaagaagaggaaagtcggctctggccctgccgctaagagagtgaagctggactgagctggagcctcggtggccatgcttcttgccccttgggcctccccccagcccctcctccccttcctgcacccgtacccccgtggtctttgaataaagtctgagtgggcggcaaaaaaaaaaaaaaataaaaaaaaaaaaaaaaaaaaaaaaaaattaaaaaaaaaaaaaaaaaaaaaaaaaaaaaaaaaaattttaaaaaaaaaaaaaaaaaaaaaaaaaaaaaaaaaaaaaaaaaaaaaa

SEQ ID NO: 940 - RNA, 37 nt, synthetic construct
  source 1..37: mol_type = other RNA
agggacccgcagctcagctacagcacagatcagcacc

SEQ ID NO: 941 - RNA, 47 nt, synthetic construct
  source 1..47: mol_type = other RNA
ctgctcagttcatccctagaggcagctgctccaggaacagaggtgcc

SEQ ID NO: 942 - RNA, 41 nt, synthetic construct
  source 1..41: mol_type = other RNA
ctagcttttctcttctgtcaaccccacacgcctttggcaca

SEQ ID NO: 943 - RNA, 148 nt, synthetic construct
  source 1..148: mol_type = other RNA
actggaaaagatagtgaccttaccagggccaaagtttgtagacacaggaattacgaaatggagaagggggagaagtgagctagtggcagcataaaaagaccagcagatgccccacagcactgctcttccagaggcaagaccaaccaag

SEQ ID NO: 944 - RNA, 36 nt, synthetic construct
  source 1..36: mol_type = other RNA
agcactgcctggctccacgtgcctcctggtctcagt

SEQ ID NO: 945 - RNA, 58 nt, synthetic construct
  source 1..58: mol_type = other RNA
aggcacagacaccaaggacagagacgctggctaggccgccctccccactgttaccaac

SEQ ID NO: 946 - RNA, 70 nt, synthetic construct
  source 1..70: mol_type = other RNA
actataaatagcagccacctctccctggcagacagggacccgcagctcagctacagcacagatcagcacc

SEQ ID NO: 947 - RNA, 47 nt, synthetic construct
  source 1..47: mol_type = other RNA
ctcctcagcttcaggcaccaccactgacctgggacagtgaatcgaca

SEQ ID NO: 948 - RNA, 146 nt, synthetic construct
  source 1..146: mol_type = other RNA
aggcggtcaggggaaggctcaggaggagggagatcaacatcaacctgccccgccccctccccagcctgataaaggtcctgcgggcaggacaggacctcccaaccaagccctccagcaaggattcagagtgcccctccggcctcgcc

SEQ ID NO: 949 - RNA, 40 nt, synthetic construct
  source 1..40: mol_type = other RNA
actcactatttgttttcgcgcccagttgcaaaaagtgtcg

SEQ ID NO: 950 - RNA, 50 nt, synthetic construct
  source 1..50: mol_type = other RNA
aggataatatacttacatacttactaattaatactaaactcaacgccacc

SEQ ID NO: 951 - RNA, 112 nt, synthetic construct
  source 1..112: mol_type = other RNA
gcttcctcttcactctgctctcaggagatctggctgtgaggccctcagggcagggatacaaagcggggagagggtacacaatgggtatctaataaatacttaagaggtggaa

SEQ ID NO: 952 - RNA, 188 nt, synthetic construct
  source 1..188: mol_type = other RNA
gacctcaataccccaagtccacctgcctatccatcctgcgagctccttgggtcctgcaatctccagggctgcccctgtaggttgcttaaaagggacagtattctcagtgctctcctaccccacctcatgcctggcccccctccaggcatgctggcctcccaataaagctggacaagaagctgctatga

SEQ ID NO: 953 - RNA, 414 nt, synthetic construct
  source 1..414: mol_type = other RNA
catcacatttaaaagcatctcagcctaccatgagaataagagaaagaaaatgaagatcaaaagcttattcatctgtttttctttttcgttggtgtaaagccaacaccctgtctaaaaaacataaatttctttaatcattttgcctcttttctctgtgcttcaattaataaaaaatggaaagaatctaatagagtggtacagcactgttatttttcaaagatgtgttgctatcctgaaaattctgtaggttctgtggaagttccagtgttctctcttattccacttcggtagaggatttctagtttcttgtgggctaattaaataaatcattaatactcttctaagttatggattataaacattcaaaataatattttgacattatgataattctgaataaaagaacaaaaacca

SEQ ID NO: 954 - RNA, 165 nt, synthetic construct
  source 1..165: mol_type = other RNA
tgcaaggctggccggaagcccttgcctgaaagcaagatttcagcctggaagagggcaaagtggacgggagtggacaggagtggatgcgataagatgtggtttgaagctgatgggtgccagccctgcattgctgagtcaatcaataaagagctttcttttgaccca

SEQ ID NO: 955 - RNA, 122 nt, synthetic construct
  source 1..122: mol_type = other RNA
caggacacagccttggatcaggacagagacttgggggccatcctgcccctccaacccgacatgtgtacctcagctttttccctcacttgcatcaataaagcttctgtgtttggaacagctaa

SEQ ID NO: 956 - RNA, 113 nt, synthetic construct
  source 1..113: mol_type = other RNA
agtgtccagaccattgtcttccaaccccagctggcctctagaacacccactggccagtcctagagctcctgtccctacccactctttgctacaataaatgctgaatgaatcca

SEQ ID NO: 957 - RNA, 137 nt, synthetic construct
  source 1..137: mol_type = other RNA
gcttcctcttcactctgctctcaggagacctggctatgaggccctcggggcagggatacaaagttagtgaggtctatgtccagagaagctgagatatggcatataataggcatctaataaatgcttaagaggtggaa

SEQ ID NO: 958 - RNA, 1702 nt, synthetic construct
  source 1..1702: mol_type = other RNA
ctgcctctcgctcctcaacccctcccctccatccctggccccctccctggatgacattaaagaagggttgagctggtccctgcctgcatgtgactgtaaatccctcccatgttttctctgagtctccctttgcctgctgaggctgtatgtgggctccaggtaacagtgctgtcttcgggccccctgaactgtgttcatggagcatctggctgggtaggcacatgctgggcttgaatccaggggggactgaatcctcagcttacggacctgggcccatctgtttctggagggctccagtcttccttgtcctgtcttggagtccccaagaaggaatcacaggggaggaaccagataccagccatgaccccaggctccaccaagcatcttcatgtccccctgctcatcccccactcccccccacccagagttgctcatcctgccagggctggctgtgcccaccccaaggctgccctcctgggggccccagaactgcctgatcgtgccgtggcccagttttgtggcatctgcagcaacacaagagagaggacaatgtcctcctcttgacccgctgtcacctaaccagactcgggccctgcacctctcaggcacttctggaaaatgactgaggcagattcttcctgaagcccattctccatggggcaacaaggacacctattctgtccttgtccttccatcgctgccccagaaagcctcacatatctccgtttagaatcaggtcccttctccccagatgaagaggagggtctctgctttgttttctctatctcctcctcagacttgaccaggcccagcaggccccagaagaccattaccctatatcccttctcctccctagtcacatggccataggcctgctgatggctcaggaaggccattgcaaggactcctcagctatgggagaggaagcacatcacccattgacccccgcaacccctccctttcctcctctgagtcccgactggggccacatgcagcctgacttctttgtgcctgttgctgtccctgcagtcttcagagggccaccgcagctccagtgccacggcaggaggctgttcctgaatagcccctgtggtaagggccaggagagtccttccatcctccaaggccctgctaaaggacacagcagccaggaagtcccctgggcccctagctgaaggacagcctgctccctccgtctctaccaggaatggccttgtcctatggaaggcactgccccatcccaaactaatctaggaatcactgtctaaccactcactgtcatgaatgtgtacttaaaggatgaggttgagtcataccaaatagtgatttcgatagttcaaaatggtgaaattagcaattctacatgattcagtctaatcaatggataccgactgtttcccacacaagtctcctgttctcttaagcttactcactgacagcctttcactctccacaaatacattaaagatatggccatcaccaagccccctaggatgacaccagacctgagagtctgaagacctggatccaagttctgacttttccccctgacagctgtgtgaccttcgtgaagtcgccaaacctctctgagccccagtcattgctagtaagacctgcctttgagttggtatgatgttcaagttagataacaaaatgtttatacccattagaacagagaataaatagaactacatttcttgca

SEQ ID NO: 959 - RNA, 116 nt, synthetic construct
  source 1..116: mol_type = other RNA
ggacctgaagggtgacatcccaggaggggcctctgaaatttcccacaccccagcgcctgtgctgaggactccctccatgtggccccaggtgccaccaataaaaatcctacagaaaa

SEQ ID NO: 960 - RNA, 74 nt, synthetic construct
  source 1..74: mol_type = other RNA
ttgccatgtgtatgtgggttttttttttcccacatactctgatgatccttttttttttggatcattcatggcaa

SEQ ID NO: 961 - RNA, 74 nt, synthetic construct
  source 1..74: mol_type = other RNA
ttgccatgtgtatgtgggaaaaaaaaaacccacatactctgatgatccaaaaaaaaaaggatcattcatggcaa

SEQ ID NO: 962 - RNA, 185 nt, synthetic construct; identical to SEQ ID NO: 190
  source 1..185: mol_type = other RNA

SEQ ID NO: 963 - RNA, 76 nt, synthetic construct; identical to SEQ ID NO: 191
  source 1..76: mol_type = other RNA

SEQ ID NO: 964 - RNA, 53 nt, synthetic construct
  source 1..53: mol_type = other RNA
gtttttgtactccgaaaggaagctacaaagataaggcttaatgccgaaaacaa

SEQ ID NO: 965 - RNA, 53 nt, synthetic construct
  source 1..53: mol_type = other RNA
gtttttgtactccgaaaggacgctacaaagataaggcttaatgccgaaaacaa

SEQ ID NO: 966 - RNA, 53 nt, synthetic construct
  source 1..53: mol_type = other RNA
gtttttgtactccgaaaggatgctacaaagataaggcttaatgccgaaaacaa

SEQ ID NO: 967 - RNA, 53 nt, synthetic construct
  source 1..53: mol_type = other RNA
gtttttgtactccgaaaggaagctacaaagataaggcttgatgccgaaaacaa

SEQ ID NO: 968 - RNA, 53 nt, synthetic construct
  source 1..53: mol_type = other RNA
gtttttgtactccgaaaggaagctacaaagataaggctttatgccgaaaacaa

SEQ ID NO: 969 - RNA, 53 nt, synthetic construct
  source 1..53: mol_type = other RNA
gtttttgtactccgaaaggaagctacaaagataaggcttcatgccgaaaacaa

SEQ ID NO: 970 - RNA, 53 nt, synthetic construct
  source 1..53: mol_type = other RNA
gtttttgtactccgaaaggacgctacaaagataaggcttgatgccgaaaacaa

SEQ ID NO: 971 - RNA, 53 nt, synthetic construct
  source 1..53: mol_type = other RNA
gtttttgtactccgaaaggacgctacaaagataaggctttatgccgaaaacaa

SEQ ID NO: 972 - RNA, 53 nt, synthetic construct
  source 1..53: mol_type = other RNA
gtttttgtactccgaaaggatgctacaaagataaggcttgatgccgaaaacaa

SEQ ID NO: 973 - RNA, 53 nt, synthetic construct
  source 1..53: mol_type = other RNA
gtttttgtactccgaaaggatgctacaaagataaggctttatgccgaaaacaa

SEQ ID NO: 974 - RNA, 53 nt, synthetic construct
  source 1..53: mol_type = other RNA
gtttttgtactccgaaaggacgctacaaagataaggcttcatgccgaaaacaa

SEQ ID NO: 975 - RNA, 53 nt, synthetic construct
  source 1..53: mol_type = other RNA
gtttttgtactccgaaaggatgctacaaagataaggcttcatgccgaaaacaa

SEQ ID NO: 976 - RNA, 53 nt, synthetic construct
  source 1..53: mol_type = other RNA
gtttttgtactccgaaaggaagctacaaagataaggcttaatgccgaaaacac

SEQ ID NO: 977 - RNA, 53 nt, synthetic construct
  source 1..53: mol_type = other RNA
gtttttgtactccgaaaggaagctacaaagataaggcttaatgccgaaaacag

SEQ ID NO: 978 - RNA, 53 nt, synthetic construct
  source 1..53: mol_type = other RNA
gtttttgtactccgaaaggaagctacaaagataaggcttaatgccgaaaacat

SEQ ID NO: 979 - RNA, 53 nt, synthetic construct
  source 1..53: mol_type = other RNA
gtttttgtactccgaaaggaagctacaaagataaggcttaatgccgaaaacca

SEQ ID NO: 980 - RNA, 53 nt, synthetic construct
  source 1..53: mol_type = other RNA
gtttttgtactccgaaaggaagctacaaagataaggcttaatgccgaaaacga

SEQ ID NO: 981 - RNA, 53 nt, synthetic construct
  source 1..53: mol_type = other RNA
gtttttgtactccgaaaggaagctacaaagataaggcttaatgccgaaaacta

SEQ ID NO: 982 - RNA, 53 nt, synthetic construct
  source 1..53: mol_type = other RNA
gtttttgtactccgaaaggaagctacaaagataaggcttaatgccgaaaccaa

SEQ ID NO: 983 - RNA, 53 nt, synthetic construct
  source 1..53: mol_type = other RNA
gtttttgtactccgaaaggaagctacaaagataaggcttaatgccgaaagcaa

SEQ ID NO: 984 - RNA, 53 nt, synthetic construct
  source 1..53: mol_type = other RNA
gtttttgtactccgaaaggaagctacaaagataaggcttaatgccgaaatcaa

SEQ ID NO: 985 - RNA, 53 nt, synthetic construct
  source 1..53: mol_type = other RNA
gtttttgtactccgaaaggaagctacaaagataaggcttcatgccgaaatcaa

SEQ ID NO: 986 - RNA, 53 nt, synthetic construct
  source 1..53: mol_type = other RNA
gtttttgtactccgaaaggaagctacaaagataaggcttcatgccgaaaccaa

SEQ ID NO: 987 - RNA, 53 nt, synthetic construct
  source 1..53: mol_type = other RNA
gtttttgtactccgaaaggaagctacaaagataaggcttcatgccgaaagcaa

SEQ ID NO: 988 - RNA, 53 nt, synthetic construct
  source 1..53: mol_type = other RNA
gtttttgtactccgaaaggaagctacaaagataaggcttgatgccgaaatcaa

SEQ ID NO: 989 - RNA, 53 nt, synthetic construct
  source 1..53: mol_type = other RNA
gtttttgtactccgaaaggaagctacaaagataaggcttcatgccgaaatcag

SEQ ID NO: 990 - RNA, 53 nt, synthetic construct
  source 1..53: mol_type = other RNA
gtttttgtactccgaaaggacgctacaaagataaggcttaatgccgaaaaccc

SEQ ID NO: 991 - RNA, 53 nt, synthetic construct
  source 1..53: mol_type = other RNA
gtttttgtactccgaaaggacgctacaaagataaggcttaatgccgaaaaccg

SEQ ID NO: 992 - RNA, 53 nt, synthetic construct
  source 1..53: mol_type = other RNA
gtttttgtactccgaaaggacgctacaaagataaggcttaatgccgaaaacct

SEQ ID NO: 993 - RNA, 53 nt, synthetic construct
  source 1..53: mol_type = other RNA
gtttttgtactccgaaaggacgctacaaagataaggcttaatgccgaaaacgc

SEQ ID NO: 994 - RNA, 53 nt, synthetic construct
  source 1..53: mol_type = other RNA
gtttttgtactccgaaaggacgctacaaagataaggcttaatgccgaaaacgg

SEQ ID NO: 995 - RNA, 53 nt, synthetic construct
  source 1..53: mol_type = other RNA
gtttttgtactccgaaaggacgctacaaagataaggcttaatgccgaaaacgt

SEQ ID NO: 996 - RNA, 53 nt, synthetic construct
  source 1..53: mol_type = other RNA
gtttttgtactccgaaaggacgctacaaagataaggcttaatgccgaaaactc

SEQ ID NO: 997 - RNA, 53 nt, synthetic construct
  source 1..53: mol_type = other RNA
gtttttgtactccgaaaggacgctacaaagataaggcttaatgccgaaaactg

SEQ ID NO: 998 - RNA, 53 nt, synthetic construct
  source 1..53: mol_type = other RNA
gtttttgtactccgaaaggacgctacaaagataaggcttaatgccgaaaactt

SEQ ID NO: 999 - RNA, 53 nt, synthetic construct
  source 1..53: mol_type = other RNA
gtttttgtactccgaaaggatgctacaaagataaggcttaatgccgaaaaccc

SEQ ID NO: 1000 - RNA, 53 nt, synthetic construct; identical to SEQ ID NO: 700
  modified_base 12: mod_base = cm
  modified_base 13: mod_base = um
  modified_base 14: mod_base = gm
  modified_base 15: mod_base = OTHER; note = 2'-O-methyladenosine
  modified_base 16: mod_base = OTHER; note = 2'-O-methyladenosine
  modified_base 17: mod_base = OTHER; note = 2'-O-methyladenosine
  modified_base 18: mod_base = OTHER; note = 2'-O-methyladenosine
  modified_base 19: mod_base = gm
  modified_base 52: mod_base = OTHER; note = 2'-O-methyladenosine
  modified_base 53: mod_base = OTHER; note = 2'-O-methyladenosine
  source 1..53: mol_type = other RNA

SEQ ID NO: 1001 - RNA, 53 nt, synthetic construct; identical to SEQ ID NO: 700
  modified_base 1: mod_base = gm
  modified_base 3: mod_base = um
  modified_base 4: mod_base = um
  modified_base 5: mod_base = um
  modified_base 6: mod_base = um
  modified_base 7: mod_base = gm
  modified_base 8: mod_base = um
  modified_base 9: mod_base = OTHER; note = 2'-O-methyladenosine
  modified_base 12: mod_base = cm
  modified_base 13: mod_base = um
  modified_base 14: mod_base = gm
  modified_base 15: mod_base = OTHER; note = 2'-O-methyladenosine
  modified_base 16: mod_base = OTHER; note = 2'-O-methyladenosine
  modified_base 17: mod_base = OTHER; note = 2'-O-methyladenosine
  modified_base 18: mod_base = OTHER; note = 2'-O-methyladenosine
  modified_base 19: mod_base = gm
  modified_base 20: mod_base = OTHER; note = 2'-O-methyladenosine
  modified_base 21: mod_base = OTHER; note = 2'-O-methyladenosine
  modified_base 22: mod_base = gm
  modified_base 23: mod_base = cm
  modified_base 24: mod_base = um
  modified_base 25: mod_base = OTHER; note = 2'-O-methyladenosine
  modified_base 26: mod_base = cm
  modified_base 27: mod_base = OTHER; note = 2'-O-methyladenosine
  modified_base 29: mod_base = OTHER; note = 2'-O-methyladenosine
  modified_base 30: mod_base = gm
  modified_base 31: mod_base = OTHER; note = 2'-O-methyladenosine
  modified_base 32: mod_base = um
  modified_base 36: mod_base = gm
  modified_base 37: mod_base = cm
  modified_base 38: mod_base = um
  modified_base 40: mod_base = cm
  modified_base 44: mod_base = cm
  modified_base 45: mod_base = cm
  modified_base 49: mod_base = OTHER; note = 2'-O-methyladenosine
  modified_base 50: mod_base = um
  modified_base 52: mod_base = OTHER; note = 2'-O-methyladenosine
  modified_base 53: mod_base = OTHER; note = 2'-O-methyladenosine
  source 1..53: mol_type = other RNA

SEQ ID NO: 1002 - RNA, 53 nt, synthetic construct; identical to SEQ ID NO: 700
  modified_base 1: mod_base = gm
  modified_base 3: mod_base = um
  modified_base 5: mod_base = um
  modified_base 6: mod_base = um
  modified_base 7: mod_base = gm
  modified_base 8: mod_base = um
  modified_base 9: mod_base = OTHER; note = 2'-O-methyladenosine
  modified_base 12: mod_base = cm
  modified_base 13: mod_base = um
  modified_base 14: mod_base = gm
  modified_base 15: mod_base = OTHER; note = 2'-O-methyladenosine
  modified_base 16: mod_base = OTHER; note = 2'-O-methyladenosine
  modified_base 17: mod_base = OTHER; note = 2'-O-methyladenosine
  modified_base 18: mod_base = OTHER; note = 2'-O-methyladenosine
  modified_base 19: mod_base = gm
  modified_base 20: mod_base = OTHER; note = 2'-O-methyladenosine
  modified_base 21: mod_base = OTHER; note = 2'-O-methyladenosine
  modified_base 23: mod_base = cm
  modified_base 25: mod_base = OTHER; note = 2'-O-methyladenosine
  modified_base 27: mod_base = OTHER; note = 2'-O-methyladenosine
  modified_base 29: mod_base = OTHER; note = 2'-O-methyladenosine
  modified_base 31: mod_base = OTHER; note = 2'-O-methyladenosine
  modified_base 37: mod_base = cm
  modified_base 38: mod_base = um
  modified_base 40: mod_base = cm
  modified_base 50: mod_base = um
  modified_base 52: mod_base = OTHER; note = 2'-O-methyladenosine
  modified_base 53: mod_base = OTHER; note = 2'-O-methyladenosine
  source 1..53: mol_type = other RNA

SEQ ID NO: 1003 - RNA, 53 nt, synthetic construct; identical to SEQ ID NO: 700
  modified_base 1: mod_base = gm
  modified_base 3: mod_base = um
  modified_base 5: mod_base = um
  modified_base 6: mod_base = um
  modified_base 7: mod_base = gm
  modified_base 8: mod_base = um
  modified_base 9: mod_base = OTHER; note = 2'-O-methyladenosine
  modified_base 12: mod_base = cm
  modified_base 13: mod_base = um
  modified_base 14: mod_base = gm
  modified_base 15: mod_base = OTHER; note = 2'-O-methyladenosine
  modified_base 16: mod_base = OTHER; note = 2'-O-methyladenosine
  modified_base 17: mod_base = OTHER; note = 2'-O-methyladenosine
  modified_base 18: mod_base = OTHER; note = 2'-O-methyladenosine
  modified_base 19: mod_base = gm
  modified_base 20: mod_base = OTHER; note = 2'-O-methyladenosine
  modified_base 21: mod_base = OTHER; note = 2'-O-methyladenosine
  modified_base 22: mod_base = gm
  modified_base 24: mod_base = um
  modified_base 26: mod_base = cm
  modified_base 30: mod_base = gm
  modified_base 32: mod_base = um
  modified_base 37: mod_base = cm
  modified_base 38: mod_base = um
  modified_base 40: mod_base = cm
  modified_base 50: mod_base = um
  modified_base 52: mod_base = OTHER; note = 2'-O-methyladenosine
  modified_base 53: mod_base = OTHER; note = 2'-O-methyladenosine
  source 1..53: mol_type = other RNA

SEQ ID NO: 1004 - RNA, 53 nt, synthetic construct; identical to SEQ ID NO: 700
  modified_base 1: mod_base = gm
  modified_base 3: mod_base = um
  modified_base 5: mod_base = um
  modified_base 7: mod_base = gm
  modified_base 9: mod_base = OTHER; note = 2'-O-methyladenosine
  modified_base 12: mod_base = cm
  modified_base 13: mod_base = um
  modified_base 14: mod_base = gm
  modified_base 15: mod_base = OTHER; note = 2'-O-methyladenosine
  modified_base 16: mod_base = OTHER; note = 2'-O-methyladenosine
  modified_base 17: mod_base = OTHER; note = 2'-O-methyladenosine
  modified_base 18: mod_base = OTHER; note = 2'-O-methyladenosine
  modified_base 19: mod_base = gm
  modified_base 20: mod_base = OTHER; note = 2'-O-methyladenosine
  modified_base 21: mod_base = OTHER; note = 2'-O-methyladenosine
  modified_base 23: mod_base = cm
  modified_base 25: mod_base = OTHER; note = 2'-O-methyladenosine
  modified_base 27: mod_base = OTHER; note = 2'-O-methyladenosine
  modified_base 29: mod_base = OTHER; note = 2'-O-methyladenosine
  modified_base 31: mod_base = OTHER; note = 2'-O-methyladenosine
  modified_base 37: mod_base = cm
  modified_base 38: mod_base = um
  modified_base 40: mod_base = cm
  modified_base 50: mod_base = um
  modified_base 52: mod_base = OTHER; note = 2'-O-methyladenosine
  modified_base 53: mod_base = OTHER; note = 2'-O-methyladenosine
  source 1..53: mol_type = other RNA

SEQ ID NO: 1005 - RNA, 53 nt, synthetic construct; identical to SEQ ID NO: 700
  modified_base 1: mod_base = gm
  modified_base 3: mod_base = um
  modified_base 5: mod_base = um
  modified_base 7: mod_base = gm
  modified_base 9: mod_base = OTHER; note = 2'-O-methyladenosine
  modified_base 12: mod_base = cm
  modified_base 13: mod_base = um
  modified_base 14: mod_base = gm
  modified_base 15: mod_base = OTHER; note = 2'-O-methyladenosine
  modified_base 16: mod_base = OTHER; note = 2'-O-methyladenosine
  modified_base 17: mod_base = OTHER; note = 2'-O-methyladenosine
  modified_base 18: mod_base = OTHER; note = 2'-O-methyladenosine
  modified_base 19: mod_base = gm
  modified_base 20: mod_base = OTHER; note = 2'-O-methyladenosine
  modified_base 21: mod_base = OTHER; note = 2'-O-methyladenosine
  modified_base 22: mod_base = gm
  modified_base 24: mod_base = um
  modified_base 26: mod_base = cm
  modified_base 30: mod_base = gm
  modified_base 32: mod_base = um
  modified_base 37: mod_base = cm
  modified_base 38: mod_base = um
  modified_base 40: mod_base = cm
  modified_base 50: mod_base = um
  modified_base 52: mod_base = OTHER; note = 2'-O-methyladenosine
  modified_base 53: mod_base = OTHER; note = 2'-O-methyladenosine
  source 1..53: mol_type = other RNA

SEQ ID NO: 1006 - RNA, 53 nt, synthetic construct; identical to SEQ ID NO: 700
  modified_base 5: mod_base = um
  modified_base 7: mod_base = gm
  modified_base 9: mod_base = OTHER; note = 2'-O-methyladenosine
  modified_base 12: mod_base = cm
  modified_base 13: mod_base = um
  modified_base 14: mod_base = gm
  modified_base 15: mod_base = OTHER; note = 2'-O-methyladenosine
  modified_base 16: mod_base = OTHER; note = 2'-O-methyladenosine
  modified_base 17: mod_base = OTHER; note = 2'-O-methyladenosine
  modified_base 18: mod_base = OTHER; note = 2'-O-methyladenosine
  modified_base 19: mod_base = gm
  modified_base 20: mod_base = OTHER; note = 2'-O-methyladenosine
  modified_base 21: mod_base = OTHER; note = 2'-O-methyladenosine
  modified_base 23: mod_base = cm
  modified_base 25: mod_base = OTHER; note = 2'-O-methyladenosine
  modified_base 27: mod_base = OTHER; note = 2'-O-methyladenosine
  modified_base 29: mod_base = OTHER; note = 2'-O-methyladenosine
  modified_base 31: mod_base = OTHER; note = 2'-O-methyladenosine
  modified_base 37: mod_base = cm
  modified_base 38: mod_base = um
  modified_base 40: mod_base = cm
  modified_base 50: mod_base = um
  modified_base 52: mod_base = OTHER; note = 2'-O-methyladenosine
  modified_base 53: mod_base = OTHER; note = 2'-O-methyladenosine
  source 1..53: mol_type = other RNA

SEQ ID NO: 1007 - RNA, 53 nt, synthetic construct; identical to SEQ ID NO: 700
  modified_base 5: mod_base = um
  modified_base 7: mod_base = gm
  modified_base 9: mod_base = OTHER; note = 2'-O-methyladenosine
  modified_base 12: mod_base = cm
  modified_base 13: mod_base = um
  modified_base 14: mod_base = gm
  modified_base 15: mod_base = OTHER; note = 2'-O-methyladenosine
  modified_base 16: mod_base = OTHER; note = 2'-O-methyladenosine
  modified_base 17: mod_base = OTHER; note = 2'-O-methyladenosine
  modified_base 18: mod_base = OTHER; note = 2'-O-methyladenosine
  modified_base 19: mod_base = gm
  modified_base 20: mod_base = OTHER; note = 2'-O-methyladenosine
  modified_base 21: mod_base = OTHER; note = 2'-O-methyladenosine
  modified_base 22: mod_base = gm
  modified_base 24: mod_base = um
  modified_base 26: mod_base = cm
  modified_base 30: mod_base = gm
  modified_base 32: mod_base = um
  modified_base 37: mod_base = cm
  modified_base 38: mod_base = um
  modified_base 40: mod_base = cm
  modified_base 50: mod_base = um
  modified_base 52: mod_base = OTHER; note = 2'-O-methyladenosine
  modified_base 53: mod_base = OTHER; note = 2'-O-methyladenosine
  source 1..53: mol_type = other RNA

SEQ ID NO: 1008 - RNA, 53 nt, synthetic construct; identical to SEQ ID NO: 700
  modified_base 5: mod_base = um
  modified_base 7: mod_base = gm
  modified_base 9: mod_base = OTHER; note = 2'-O-methyladenosine
  modified_base 12: mod_base = cm
  modified_base 13: mod_base = um
  modified_base 14: mod_base = gm
  modified_base 15: mod_base = OTHER; note = 2'-O-methyladenosine
  modified_base 16: mod_base = OTHER; note = 2'-O-methyladenosine
  modified_base 17: mod_base = OTHER; note = 2'-O-methyladenosine
  modified_base 18: mod_base = OTHER; note = 2'-O-methyladenosine
  modified_base 19: mod_base = gm
  modified_base 52: mod_base = OTHER; note = 2'-O-methyladenosine
  modified_base 53: mod_base = OTHER; note = 2'-O-methyladenosine
  source 1..53: mol_type = other RNA

SEQ ID NO: 1009 - RNA, 53 nt, synthetic construct; identical to SEQ ID NO: 700
  modified_base 3: mod_base = OTHER; note = 2' fluoro modified base
  modified_base 4: mod_base = OTHER; note = 2' fluoro modified base
  modified_base 5: mod_base = um
  modified_base 6: mod_base = um
  modified_base 7: mod_base = gm
  modified_base 8: mod_base = um
  modified_base 9: mod_base = OTHER; note = 2'-O-methyladenosine
  modified_base 12: mod_base = cm
  modified_base 13: mod_base = um
  modified_base 14: mod_base = gm
  modified_base 15: mod_base = OTHER; note = 2'-O-methyladenosine
  modified_base 16: mod_base = OTHER; note = 2'-O-methyladenosine
  modified_base 17: mod_base = OTHER; note = 2'-O-methyladenosine
  modified_base 18: mod_base = OTHER; note = 2'-O-methyladenosine
  modified_base 19: mod_base = gm
  modified_base 20: mod_base = OTHER; note = 2'-O-methyladenosine
  modified_base 21: mod_base = OTHER; note = 2'-O-methyladenosine
  modified_base 25: mod_base = OTHER; note = 2' fluoro modified base
  modified_base 26: mod_base = OTHER; note = 2' fluoro modified base
  modified_base 27: mod_base = OTHER; note = 2' fluoro modified base
  modified_base 29: mod_base = OTHER; note = 2'-O-methyladenosine
  modified_base 30: mod_base = OTHER; note = 2' fluoro modified base
  modified_base 31: mod_base = OTHER; note = 2' fluoro modified base
  modified_base 32: mod_base = OTHER; note = 2' fluoro modified base
  modified_base 36: mod_base = OTHER; note = 2' fluoro modified base
  modified_base 37: mod_base = cm
  modified_base 38: mod_base = um
  modified_base 40: mod_base = cm
  modified_base 42: mod_base = OTHER; note = 2' fluoro modified base
  modified_base 44: mod_base = OTHER; note = 2' fluoro modified base
  modified_base 45: mod_base = OTHER; note = 2' fluoro modified base
  modified_base 49: mod_base = OTHER; note = 2' fluoro modified base
  modified_base 50: mod_base = um
  modified_base 52: mod_base = OTHER; note = 2'-O-methyladenosine
  modified_base 53: mod_base = OTHER; note = 2'-O-methyladenosine
  source 1..53: mol_type = other RNA
  modified_base 1: mod_base = OTHER; note = 2' fluoro modified base

SEQ ID NO: 1010 - RNA, 53 nt, synthetic construct; identical to SEQ ID NO: 700
  modified_base 1: mod_base = OTHER; note = 2' fluoro modified base
  modified_base 3: mod_base = OTHER; note = 2' fluoro modified base
  modified_base 4: mod_base = OTHER; note = 2' fluoro modified base
  modified_base 5: mod_base = um
  modified_base 6: mod_base = um
  modified_base 7: mod_base = gm
  modified_base 8: mod_base = um
  modified_base 9: mod_base = OTHER; note = 2'-O-methyladenosine
  modified_base 12: mod_base = cm
  modified_base 13: mod_base = um
  modified_base 14: mod_base = gm
  modified_base 15: mod_base = OTHER; note = 2'-O-methyladenosine
  modified_base 16: mod_base = OTHER; note = 2'-O-methyladenosine
  modified_base 17: mod_base = OTHER; note = 2'-O-methyladenosine
  modified_base 18: mod_base = OTHER; note = 2'-O-methyladenosine
  modified_base 19: mod_base = gm
  modified_base 20: mod_base = OTHER; note = 2'-O-methyladenosine
  modified_base 21: mod_base = OTHER; note = 2'-O-methyladenosine
  modified_base 22: mod_base = OTHER; note = 2' fluoro modified base
  modified_base 23: mod_base = OTHER; note = 2' fluoro modified base
  modified_base 25: mod_base = OTHER; note = 2' fluoro modified base
  modified_base 26: mod_base = OTHER; note = 2' fluoro modified base
  modified_base 27: mod_base = OTHER; note = 2' fluoro modified base
  modified_base 29: mod_base = OTHER; note = 2' fluoro modified base
  modified_base 30: mod_base = OTHER; note = 2' fluoro modified base
  modified_base 31: mod_base = OTHER; note = 2' fluoro modified base
  modified_base 32: mod_base = OTHER; note = 2' fluoro modified base
  modified_base 36: mod_base = OTHER; note = 2' fluoro modified base
  modified_base 37: mod_base = OTHER; note = 2' fluoro modified base
  modified_base 38: mod_base = OTHER; note = 2' fluoro modified base
  modified_base 40: mod_base = OTHER; note = 2' fluoro modified base
  modified_base 42: mod_base = OTHER; note = 2' fluoro modified base
  modified_base 44: mod_base = OTHER; note = 2' fluoro modified base
  modified_base 45: mod_base = OTHER; note = 2' fluoro modified base
  modified_base 49: mod_base = OTHER; note = 2' fluoro modified base
  modified_base 50: mod_base = OTHER; note = 2' fluoro modified base
  modified_base 52: mod_base = OTHER; note = 2'-O-methyladenosine
  modified_base 53: mod_base = OTHER; note = 2'-O-methyladenosine
  source 1..53: mol_type = other RNA

SEQ ID NO: 1011 - RNA, 53 nt, synthetic construct; identical to SEQ ID NO: 700
  modified_base 1: mod_base = OTHER; note = 2' fluoro modified base
  modified_base 3: mod_base = OTHER; note = 2' fluoro modified base
  modified_base 4: mod_base = OTHER; note = 2' fluoro modified base
  modified_base 5: mod_base = um
  modified_base 6: mod_base = OTHER; note = 2' fluoro modified base
  modified_base 7: mod_base = gm
  modified_base 8: mod_base = OTHER; note = 2' fluoro modified base
  modified_base 9: mod_base = OTHER; note = 2'-O-methyladenosine
  modified_base 12: mod_base = cm
  modified_base 13: mod_base = um
  modified_base 14: mod_base = gm
  modified_base 15: mod_base = OTHER; note = 2'-O-methyladenosine
  modified_base 16: mod_base = OTHER; note = 2'-O-methyladenosine
  modified_base 17: mod_base = OTHER; note = 2'-O-methyladenosine
  modified_base 18: mod_base = OTHER; note = 2'-O-methyladenosine
  modified_base 19: mod_base = gm
  modified_base 20: mod_base = OTHER; note = 2' fluoro modified base
  modified_base 21: mod_base = OTHER; note = 2'-O-methyladenosine
  modified_base 22: mod_base = OTHER; note = 2' fluoro modified base
  modified_base 23: mod_base = cm
  modified_base 25: mod_base = OTHER; note = 2' fluoro modified base
  modified_base 26: mod_base = cm
  modified_base 27: mod_base = OTHER; note = 2' fluoro modified base
  modified_base 29: mod_base = OTHER; note = 2'-O-methyladenosine
  modified_base 30: mod_base = OTHER; note = 2' fluoro modified base
  modified_base 31: mod_base = OTHER; note = 2'-O-methyladenosine
  modified_base 32: mod_base = OTHER; note = 2' fluoro modified base
  modified_base 36: mod_base = OTHER; note = 2' fluoro modified base
  modified_base 37: mod_base = cm
  modified_base 38: mod_base = OTHER; note = 2' fluoro modified base
  modified_base 40: mod_base = cm
  modified_base 42: mod_base = OTHER; note = 2' fluoro modified base
  modified_base 44: mod_base = cm
  modified_base 45: mod_base = OTHER; note = 2' fluoro modified base
  modified_base 49: mod_base = OTHER; note = 2' fluoro modified base
  modified_base 50: mod_base = um
  modified_base 52: mod_base = OTHER; note = 2'-O-methyladenosine
  modified_base 53: mod_base = OTHER; note = 2'-O-methyladenosine
  source 1..53: mol_type = other RNA

SEQ ID NO: 1012 - RNA, 53 nt, synthetic construct; identical to SEQ ID NO: 700
  modified_base 2: mod_base = OTHER; note = 2' fluoro modified base
  modified_base 5: mod_base = um
  modified_base 6: mod_base = um
  modified_base 7: mod_base = gm
  modified_base 8: mod_base = um
  modified_base 9: mod_base = OTHER; note = 2'-O-methyladenosine
  modified_base 10: mod_base = OTHER; note = 2' fluoro modified base
  modified_base 11: mod_base = OTHER; note = 2' fluoro modified base
  modified_base 12: mod_base = cm
  modified_base 13: mod_base = um
  modified_base 14: mod_base = gm
  modified_base 15: mod_base = OTHER; note = 2'-O-methyladenosine
  modified_base 16: mod_base = OTHER; note = 2'-O-methyladenosine
  modified_base 17: mod_base = OTHER; note = 2'-O-methyladenosine
  modified_base 18: mod_base = OTHER; note = 2'-O-methyladenosine
  modified_base 19: mod_base = gm
  modified_base 20: mod_base = OTHER; note = 2'-O-methyladenosine
  modified_base 21: mod_base = OTHER; note = 2'-O-methyladenosine
  modified_base 24: mod_base = OTHER; note = 2' fluoro modified base
  modified_base 28: mod_base = OTHER; note = 2' fluoro modified base
  modified_base 29: mod_base = OTHER; note = 2'-O-methyladenosine
  modified_base 35: mod_base = OTHER; note = 2' fluoro modified base
  modified_base 37: mod_base = cm
  modified_base 38: mod_base = um
  modified_base 40: mod_base = cm
  modified_base 41: mod_base = OTHER; note = 2' fluoro modified base
  modified_base 43: mod_base = OTHER; note = 2' fluoro modified base
  modified_base 46: mod_base = OTHER; note = 2' fluoro modified base
  modified_base 50: mod_base = um
  modified_base 51: mod_base = OTHER; note = 2' fluoro modified base
  modified_base 52: mod_base = OTHER; note = 2'-O-methyladenosine
  modified_base 53: mod_base = OTHER; note = 2'-O-methyladenosine
  source 1..53: mol_type = other RNA

SEQ ID NO: 1013 - RNA, 53 nt, synthetic construct; identical to SEQ ID NO: 700
  modified_base 2: mod_base = OTHER; note = 2' fluoro modified base
  modified_base 5: mod_base = um
  modified_base 6: mod_base = um
  modified_base 7: mod_base = gm
  modified_base 8: mod_base = um
  modified_base 9: mod_base = OTHER; note = 2'-O-methyladenosine
  modified_base 10: mod_base = OTHER; note = 2' fluoro modified base
  modified_base 11: mod_base = OTHER; note = 2' fluoro modified base
  modified_base 12: mod_base = cm
  modified_base 13: mod_base = um
  modified_base 14: mod_base = gm
  modified_base 15: mod_base = OTHER; note = 2'-O-methyladenosine
  modified_base 16: mod_base = OTHER; note = 2'-O-methyladenosine
  modified_base 17: mod_base = OTHER; note = 2'-O-methyladenosine
  modified_base 18: mod_base = OTHER; note = 2'-O-methyladenosine
  modified_base 19: mod_base = gm
  modified_base 20: mod_base = OTHER; note = 2'-O-methyladenosine
  modified_base 21: mod_base = OTHER; note = 2'-O-methyladenosine
  modified_base 24: mod_base = OTHER; note = 2' fluoro modified base
  modified_base 28: mod_base = OTHER; note = 2' fluoro modified base
  modified_base 35: mod_base = OTHER; note = 2' fluoro modified base
  modified_base 41: mod_base = OTHER; note = 2' fluoro modified base
  modified_base 43: mod_base = OTHER; note = 2' fluoro modified base
  modified_base 46: mod_base = OTHER; note = 2' fluoro modified base
  modified_base 51: mod_base = OTHER; note = 2' fluoro modified base
  modified_base 52: mod_base = OTHER; note = 2'-O-methyladenosine
  modified_base 53: mod_base = OTHER; note = 2'-O-methyladenosine
  source 1..53: mol_type = other RNA

SEQ ID NO: 1014 - RNA, 53 nt, synthetic construct; identical to SEQ ID NO: 700
  modified_base 2: mod_base = OTHER; note = 2' fluoro modified base
  modified_base 10: mod_base = OTHER; note = 2' fluoro modified base
  modified_base 11: mod_base = OTHER; note = 2' fluoro modified base
  modified_base 12: mod_base = cm
  modified_base 13: mod_base = um
  modified_base 14: mod_base = gm
  modified_base 15: mod_base = OTHER; note = 2'-O-methyladenosine
  modified_base 16: mod_base = OTHER; note = 2'-O-methyladenosine
  modified_base 17: mod_base = OTHER; note = 2'-O-methyladenosine
  modified_base 18: mod_base = OTHER; note = 2'-O-methyladenosine
  modified_base 19: mod_base = gm
  modified_base 24: mod_base = OTHER; note = 2' fluoro modified base
  modified_base 28: mod_base = OTHER; note = 2' fluoro modified base
  modified_base 35: mod_base = OTHER; note = 2' fluoro modified base
  modified_base 41: mod_base = OTHER; note = 2' fluoro modified base
  modified_base 43: mod_base = OTHER; note = 2' fluoro modified base
  modified_base 46: mod_base = OTHER; note = 2' fluoro modified base
  modified_base 51: mod_base = OTHER; note = 2' fluoro modified base
  modified_base 52: mod_base = OTHER; note = 2'-O-methyladenosine
  modified_base 53: mod_base = OTHER; note = 2'-O-methyladenosine
  source 1..53: mol_type = other RNA

SEQ ID NO: 1015 - protein, 667 aa, synthetic construct
NIEDEYRLHETSKEPDVSLGSTWLSDFPQAWAETGGMGLAVRQAPLIIPLKATSTPVSIKQYPMSQEARLGIKPHIQRLLDQGILVPCQSPWNTPLLPVKKPGTNDYRPVQDLREVNKRVEDIHPTVPNPYNLLSGLPPSHQWYTVLDLKDAFFCLRLHPTSQPLFAFEWRDPEMGISGQLTWTRLPQGFKNSPTLFNEALHRDLADFRIQHPDLILLQYVDDLLLAATSELDCQQGTRALLQTLGNLGYRASAKKAQICQKQVKYLGYLLKEGQRWLTEARKETVMGQPTPKTPRQLREFLGKAGFCRLFIPGFAEMAAPLYPLTKPGTLFNWGPDQQKAYQEIKQALLTAPALGLPDLTKPFELFVDEKQGYAKGVLTQKLGPWRRPVAYLSKKLDPVAAGWPPCLRMVAAIAVLTKDAGKLTMGQPLVILAPHAVEALVKQPPDRWLSNARMTHYQALLLDTDRVQFGPVVALNPATLLPLPEEGLQHNCLDILAEAHGTRPDLTDQPLPDADHTWYTDGSSLLQEGQRKAGAAVTTETEVIWAKALPAGTSAQRAELIALTQALKMAEGKKLNVYTDSRYAFATAHIHGEIYRRRGWLTSEGKEIKNKDEILALLKALFLPKRLSIIHCPGHQKGHSAEARGNRMADQAARKAAITETPDTST

SEQ ID NO: 1016 - protein, 672 aa, synthetic construct
LNLEEEYRLHEKPVPSSIDPSWLQLFPTVWAERAGMGLANQVPPVVVELRSGASPVAVRQYPMSKEAREGIRPHIQRFLDLGVLVPCQSPWNTPLLPVKKPGTNDYRPVQDLREINKRVQDIHPTVPNPYNLLSSLPPSHTWYSVLDLKDAFFCLKLHPNSQPLFAFEWRDPEKGNTGQLTWTRLPQGFKNSPTLFNEALHRDLAPFRALNPQVVLLQYVDDLLVAAPTYRDCKEGTQKLLQELSKLGYRVSAKKAQLCQKEVTYLGYLLKEGKRWLTPARKATVMKIPPPTTPRQVREFLGKAGFCRLFIPGFASLAAPLYPLTKPSIPFIWTEEHQKAFDRIKEALLSAPALALPDLTKPFTLYVDERAGVARGVLTQTLGPWRRPVAYLSKKLDPVASGWPTCLKAVAAVALLLKDADKLTLGQNVTVIASHSLESIVRQPPDRWMTNARMTHYQSLLLNERVSFAPPAVLNPATLLPVESEATPVHRCSEILAEETGTRRDLKDQPLPGVPAWYTDGSSFIAEGKRRAGAAIVDGKRTVWASSLPEGTSAQKAELVALTQALRLAEGKDINIYTDSRYAFATAHIHGAIYKQRGWLTSAGKDIKNKEEILALLEAIHLPKRVAIIHCPGHQKGNDPVATGNRRADEAAKQAALSTRVLAETTKPQELI

SEQ ID NO: 1017 - protein, 675 aa, synthetic construct; identical to SEQ ID NO: 318

SEQ ID NO: 1018 - protein, 694 aa, synthetic construct
TAPLEEEYRLFLEAPIQNVTLLEQWKREIPKVWAEINPPGLASTQAPIHVQLLSTALPVRVRQYPITLEAKRSLRETIRKFRAAGILRPVHSPWNTPLLPVRKSGTSEYRMVQDLREVNKRVETIHPTVPNPYTLLSLLPPDRIWYSVLDLKDAFFCIPLAPESQLIFAFEWADAEEGESGQLTWTRLPQGFKNSPTLFNEALNRDLQGFRLDHPSVSLLQYVDDLLIAADTQAACLSATRDLLMTLAELGYRVSGKKAQLCQEEVTYLGFKIHKGSRSLSNSRTQAILQIPVPKTKRQVREFLGKIGYCRLFIPGFAELAQPLYAATRPGNDPLVWGEKEEEAFQSLKLALTQPPALALPSLDKPFQLFVEETSGAAKGVLTQALGPWKRPVAYLSKRLDPVAAGWPRCLRAIAAAALLTREASKLTFGQDIEITSSHNLESLLRSPPDKWLTNARITQYQVLLLDPPRVRFKQTAALNPATLLPETDDTLPIHHCLDTLDSLTSTRPDLTDQPLAQAEATLFTDGSSYIRDGKRYAGAAVVTLDSVIWAEPLPIGTSAQKAELIALTKALEWSKDKSVNIYTDSRYAFATLHVHGMIYRERGWLTAGGKAIKNAPEILALLTAVWLPKRVAVMHCKGHQKDDAPTSTGNRRADEVAREVAIRPLSTQATISDAPDMPDTETPQYSNVEEALG

SEQ ID NO: 1019 - protein, 24 aa, synthetic construct
AEAAAKEAAAKAAEAAAKEAAAKA

SEQ ID NO: 1020 - protein, 46 aa, synthetic construct
AEAAAKEAAAKEAAAKEAAAKALEAEAAAKEAAAKEAAAKEAAAKA

SEQ ID NO: 1021 - protein, 54 aa, synthetic construct
GGGGSEAAAKEAAAKEAAAKEAAAKALEAEAAAKEAAAKEAAAKEAAAKSGGGG

SEQ ID NO: 1022 - protein, 15 aa, synthetic construct
EAAAKEAAAKEAAAK

SEQ ID NO: 1023 - protein, 20 aa, synthetic construct
EAAAKEAAAKEAAAKEAAAK

SEQ ID NO: 1024 - protein, 30 aa, synthetic construct
EAAAKEAAAKEAAAKEAAAKEAAAKEAAAK

SEQ ID NO: 1025 - protein, 25 aa, synthetic construct
GGGGSEAAAKEAAAKEAAAKGGGGS

SEQ ID NO: 1026 - protein, 15 aa, synthetic construct
GGGGSGGGGSGGGGS

SEQ ID NO: 1027 - protein, 20 aa, synthetic construct
GGGGSGGGGSGGGGSGGGGS

SEQ ID NO: 1028 - protein, 35 aa, synthetic construct
GGGGSGGGGSGGGGSGGGGSGGGGSGGGGSGGGGS

SEQ ID NO: 1029 - protein, 10 aa, synthetic construct
PAPAPPAPAP

SEQ ID NO: 1030 - protein, 20 aa, synthetic construct
PAPAPPAPAPPAPAPPAPAP

SEQ ID NO: 1031 - protein, 40 aa, synthetic construct
PAPAPPAPAPPAPAPPAPAPPAPAPPAPAPPAPAPPAPAP

SEQ ID NO: 1032 - protein, 14 aa, synthetic construct
EGKSSGSGSESKST

SEQ ID NO: 1033 - protein, 18 aa, synthetic construct
KESGSVSSEQLAQFRSLD

SEQ ID NO: 1034 - protein, 28 aa, synthetic construct
SGGGGSSGSETPGTSESATPESSGGGGS

SEQ ID NO: 1035 - protein, 32 aa, synthetic construct; identical to SEQ ID NO: 78

SEQ ID NO: 1036 - protein, 1890 aa, synthetic construct
MKRTADGSEFESPKKKRKVSDLVLGLDIGIGSVGVGILNKVTGEIIHKNSRIFPAAQAENNVERRINRQGRRLTRRKKHRRVRLNHLFEESGLITDFTNVSINLNPYQLRVKGLTDELSNEELFIALKNMVKHRGISYLDDASDDGNSSVGDYAQIVKENSKQLETKTPGQIQLERYQKYGQLRGDFTVEEDGKKHRLINVFPTSAYRAEALRILQTQQEFNPQITDEFINSYLQILTGKRKYYHGPGNEKSRTDYGRYTTKKDSEDEYITLDNIFGILIGKCTFYPEEYRAAKASYTAQEFNLLNDLNNLTVPTETKKLSEEQKNQIITNVKNEKAMGPAKLFKYIAKLLSCDVADIKGYRIDKSDKAEIHTFEAYRKMKTLATIDIEQMERENLDKLAYVLTLNTEKEGIQEALEHEFADGTFSQEQIDELVQFRKANSSIFGKGWHSFSVKLMMELIPELYATSEEQMTILTRLGKQKTTSSSNKTKYIDEKQLTEEIYNPVAAKSVRQAIKIVNAAIKEYGDFDNIVIEMARETNEDDEKKAIQKIQKANKDEKDAAMLKAANQYNGKAELPHSVFHGHKQLATKIRLWHQQGERCLYTGKTISIHDLINNSNQFEIDHILPLSITFDDSLANKVLVYATAAQEKGQRTPYQALDSMDDAWSFRELKAFVRDSKALSNKKKEYLLTEEDISKFDVRKKFIERNLVDTRYASRVVLNALQEHFRVHKTDTKVSVVRGQFTSQLRRHWGIEKTRDTYHHHAVDALIIAASSQLNLWKKQKNTLVSYSEDQLLDIETGELISDDEYKESVFKAPYQHFVDTLKSKEFEDSILFSYQVDSKFNRKISDATIYATRQAKVGKDKKDETYVLGKIKDIYSQTGYDAFIKIYKKDKSKFLMYRHDPQTFEKVIEPILENYPNKELNEKGKEVPCNPFLKYKEDHGYIRKYSKKGNGPEIKSLKYYDSKLGNHIDITPKNSNNKVVLQSVSPWRADVYFNKTTGKYEILGLKYADLKFEKGTGTYKISEEKYNDIKIKEGVDSDSEFKFTLYKNDLLLIKDTETKEQQLFRFLSRTMPNVKHYVELKPYDKQKFDDNEELIKILGIVAKGGQCKKGVSKPNISIYKIRTDVLGNQHIIKNEGDKPKLDFSGGSSGGSKRTADGSEFESPKKKRKVSGGSSGGSTLNIEDEYRLHETSKEPDVSLGSTWLSDFPQAWAETGGMGLAVRQAPLIIPLKATSTPVSIKQYPMSQEARLGIKPHIQRLLDQGILVPCQSPWNTPLLPVKKPGTNDYRPVQDLREVNKRVEDIHPTVPNPYNLLSGLPPSHQWYTVLDLKDAFFCLRLHPTSQPLFAFEWRDPEMGISGQLTWTRLPQGFKNSPTLFNEALHRDLADFRIQHPDLILLQYVDDLLLAATSELDCQQGTRALLQTLGNLGYRASAKKAQICQKQVKYLGYLLKEGQRWLTEARKETVMGQPTPKTPRQLREFLGKAGFCRLFIPGFAEMAAPLYPLTKPGTLFNWGPDQQKAYQEIKQALLTAPALGLPDLTKPFELFVDEKQGYAKGVLTQKLGPWRRPVAYLSKKLDPVAAGWPPCLRMVAAIAVLTKDAGKLTMGQPLVILAPHAVEALVKQPPDRWLSNARMTHYQALLLDTDRVQFGPVVALNPATLLPLPEEGLQHNCLDILAEAHGTRPDLTDQPLPDADHTWYTDGSSLLQEGQRKAGAAVTTETEVIWAKALPAGTSAQRAELIALTQALKMAEGKKLNVYTDSRYAFATAHIHGEIYRRRGWLTSEGKEIKNKDEILALLKALFLPKRLSIIHCPGHQKGHSAEARGNRMADQAARKAAITETPDTSTLLIENSSPSGGSKRTADGSEFESPKKKRKVGSGPAAKRVKLD

SEQ ID NO: 1037 - RNA, 6557 nt, synthetic construct
  source 1..6557: mol_type = other RNA
aggaaataagagagaaaagaagagtaagaagaaatataagagccaccatgaaacggacagccgacggaagcgagttcgagtcaccaaagaagaagcggaaagtcagcgacctcgtgctgggcctcgacatcgggatcggaagcgtcggcgtgggaatcctgaacaaggtcaccggcgagatcatccacaagaacagtagaatcttccctgccgcccaggccgagaacaatgtggagcgcagaattaatagacagggcagaagactgaccagacggaagaagcacagaagagtgcggctgaaccatctgttcgaggagtccggactgatcaccgacttcacaaacgtgagcatcaacctgaacccttatcagctgagagtgaagggcctgaccgacgaactgagcaatgaggagctgttcatcgccctgaagaatatggtcaaacaccggggcatcagctacctggacgacgccagcgatgacggaaacagcagcgtgggcgactacgcccagatcgtgaaagagaacagcaagcagctggaaacaaagacccccggccagatccagctggagcggtaccagaagtacggccaactgcggggagacttcacagtggaagaagacggcaagaagcacagactgattaacgtcttccctaccagcgcctacagggccgaggccctgcggatactgcagacccagcaagagttcaaccctcagattaccgacgaattcatcaactcttacctgcagatcctgaccggaaagaggaagtactaccacggccccggcaacgaaaagagcagaacggattacggaagatacaccacaaagaaagatagcgaggacgagtacatcacgctggacaacatcttcggcatcctgatcggcaagtgcaccttctaccctgaggaatacagagccgccaaggccagctacaccgcccaggagtttaacctgctgaacgatctgaacaacctgacagtgcccaccgagacaaagaaactgtccgaggagcagaagaaccagattatcaccaacgtcaagaacgaaaaggccatgggacccgccaagctgttcaagtacatagccaagctcctgtcctgtgacgtggccgacatcaagggctaccgaatcgacaagtccgataaggccgagatccacaccttcgaggcctacagaaagatgaagaccctggcaacaatagacatagaacaaatggagagagagaacctggacaagctcgcatacgtgctcaccctgaacacagagaaggaaggaatacaggaggccctggagcatgaatttgctgacggaacctttagccaggagcaaatcgacgaactagtgcagttccggaaagccaactcaagcatctttggcaagggctggcacagcttcagcgtcaagctgatgatggagctgatccctgagctgtacgccaccagcgaggagcagatgacaatcctgaccagactgggcaagcaaaagacaaccagcagcagcaacaaaaccaagtacatcgacgagaagcagctgaccgaggaaatctacaatcccgtggccgccaaaagcgtgcgccaggccatcaaaatcgtgaacgccgccatcaaggaatacggcgacttcgacaacattgtgatcgaaatggcaagagagacaaacgaggacgatgaaaagaaggctatccagaaaatccagaaagccaataaggacgagaaagacgccgccatgctgaaggccgccaaccaatataacggcaaggccgagctgcctcacagtgtattccacggccacaagcagctggccaccaagatccggctgtggcaccagcagggcgagagatgcctgtatacaggtaaaaccatcagcatccacgacctgatcaacaacagcaaccagttcgaaatcgatcatatcctgcccctaagcatcacgttcgacgactccctggccaacaaagtgctggtgtacgctaccgcagcccaagagaaaggccagcggaccccttaccaggccctggacagcatggatgacgcctggtccttcagagagctaaaggccttcgtgcgggacagcaaagccctgagcaacaaaaagaaggagtacctgctgacagaggaggacatctccaagttcgacgtgagaaagaagttcatcgagcggaacctggtggacacccggtacgccagcagagtggtgctgaacgcgctacaggagcacttcagagtgcacaagacagacacaaaggtgtctgtggtgagaggccagttcacctcccagctgcggagacactggggcatcgagaaaacaagagacacctaccaccaccacgccgtggatgctctgatcatcgccgcaagcagccagctcaacctgtggaagaagcagaagaacacactggtgagctacagcgaagaccagctgctggacattgaaacgggcgaactgattagcgatgacgagtacaaggaaagcgtgtttaaagccccttaccagcactttgtcgacaccctgaagagtaaggagttcgaggacagcatcctgttctcctaccaagtggacagcaagttcaacagaaagatcagcgacgccaccatctacgccaccagacaggccaaagtgggcaaggacaagaaggacgagacatacgtgctgggcaagatcaaagacatttacagccagaccggatacgacgcctttataaagatatacaaaaaagacaagagcaagttcctgatgtacagacacgaccctcagaccttcgagaaggtgatcgaacctatcctggagaactaccctaacaaagaactgaatgagaagggcaaagaggtaccatgcaacccatttctgaaatacaaggaggaccacggctacatcagaaagtacagcaaaaaaggaaacggccccgaaatcaagagcctgaagtactacgatagcaagctgggcaatcacatagacatcacacccaagaactccaacaacaaggtcgttctgcagagcgtgtccccttggcgggctgacgtgtacttcaataagaccaccggcaaatacgaaatcctgggcctgaagtacgcggacctgaagttcgaaaagggcacaggcacatacaagatcagcgaggaaaagtacaacgacatcaaaatcaaggagggcgtggacagcgacagcgaattcaagttcaccctgtacaagaacgacctgctgctgatcaaggatacggaaacaaaggagcagcaactattccggttcctgagccggaccatgccaaatgtgaagcattacgtagaactgaaaccatacgataaacagaaattcgatgacaacgaggagctgatcaagatcctggggatcgtggccaagggaggccagtgcaagaagggcgtgtccaaaccaaacatcagcatctacaagatcagaaccgacgtgctgggcaaccagcacatcatcaagaacgaaggcgataagcccaagctggacttctccggcggaagctctggtggcagcaagcggaccgccgacggctctgaattcgagagccctaagaagaaaagaaaggtgagcggaggctctagcggcggaagcaccctgaacattgaagacgagtatagactgcatgaaacaagcaaggaacccgacgtgtccctgggctccacctggctgtccgactttccccaggcctgggccgagacaggaggaatgggcctggccgtgcggcaggcacccctgatcatccctctgaaggccacctctacacccgtgagcatcaagcagtaccctatgtctcaggaggccagactgggcatcaagcctcacatccagaggctgctggaccagggcatcctggtgccatgccagagcccctggaacacaccactgctgcccgtgaagaagccaggcaccaatgactatagacccgtgcaggatctgagagaggtgaacaagagggtggaggatatccaccccaccgtgcccaacccttacaatctgctgtccggcctgcccccttctcaccagtggtatacagtgctggacctgaaggatgccttcttttgtctgagactgcaccctaccagccagccactgttcgcctttgagtggagggaccctgagatgggcatctctggccagctgacctggacacgcctgcctcagggcttcaagaatagcccaacactgtttaacgaggccctgcaccgcgacctggcagatttccggatccagcacccagatctgatcctgctgcagtacgtggacgatctgctgctggccgccaccagcgagctggattgccagcagggaacacgcgccctgctgcagaccctgggaaacctgggatatagggcatccgccaagaaggcccagatctgtcagaagcaggtgaagtacctgggctatctgctgaaggagggccagagatggctgacagaggccaggaaggagacagtgatgggccagccaacacccaagaccccaagacagctgagggagttcctgggcaaagcaggattttgcaggctgttcatcccaggattcgcagagatggcagcacctctgtacccactgaccaagccgggcaccctgtttaattggggccctgaccagcagaaggcctatcaggagatcaagcaggccctgctgacagcaccagccctgggcctgccagacctgaccaagcctttcgagctgtttgtggatgagaagcagggctacgccaagggcgtgctgacccagaagctgggaccatggagacggcccgtggcctatctgtccaagaagctggacccagtggcagcaggatggccaccatgcctgaggatggtggcagcaatcgccgtgctgacaaaggatgccggcaagctgaccatgggacagccactggtcatcctggcaccacacgcagtggaggccctggtgaagcagcctccagatcgctggctgtctaacgcccggatgacacactaccaggccctgctgctggacaccgatcgcgtgcagtttggccctgtggtggccctgaatccagccaccctgctgcctctgccagaggagggcctgcagcacaactgtctggacatcctggcagaggcacacggaacaaggccagacctgaccgatcagcccctgcctgacgccgatcacacatggtataccgatggaagctccctgctgcaggagggccagaggaaggcaggagcagcagtgaccacagagacagaagtgatctgggccaaggccctgccagcaggcacatccgcccagcgggccgagctgatcgccctgacccaggccctgaagatggccgagggcaagaagctgaacgtgtacacagactccagatatgccttcgccaccgcacacatccacggagagatctacaggcgccggggctggctgacctctgagggcaaggagatcaagaacaaggatgagatcctggccctgctgaaggccctgtttctgcccaagcggctgagcatcatccactgtcctggacaccagaagggacactccgccgaggcaaggggcaatcggatggccgaccaggccgccagaaaggctgctattactgaaactcccgacacttccactctgctgattgaaaactcctccccttctggcggctcaaaaagaaccgccgacggcagcgaattcgagtctcccaagaagaagaggaaagtcggctctggccctgccgctaagagagtgaagctggactaatagtgagctggagcctcggtggccatgcttcttgccccttgggcctccccccagcccctcctccccttcctgcacccgtacccccgtggtctttgaataaagtctgagtgggcggcaatcaacctctggattacaaaatttgtgaaagattgactgatattcttaactatgttgctccttttacgctgtgtggatatgctgctttaatgcctctgtatcatgctattgcttcccgtacggctttcgttttctcctccttgtataaatcctggttgctgtctctttatgaggagttgtggcccgttgtccgtcaacgtggcgtggtgtgctctgtgtttgctgacgcaacccccactggctggggcattgccaccacctgtcaactcctttctgggactttcgctttccccctcccgatcgccacggcagaactcatcgccgcctgccttgcccgctgctggacaggggctaggttgctgggcactgataattccgtggtgttgtcggggaagctgacgtcctttccagggctgctcgcctgtgttgccaactggatcctgcgcgggacgtccttctgctacgtcccttcggctctcaatccagcggacctcccttcccgaggccttctgccggttctgcggcctctcccgcgtcttcgctttcggcctccgacgagtcggatctccctttgggccgcctccccgcctgaaaaaaaaaaaaaaacaaaaaaaaaaaaaaaaaaaaaaaaaaaccaaaaaaaaaaaaaaaaaaaaaaaaaaaaaaaaaacccccaaaaaaaaaaaaaaaaaaaaaaaaaaaaaaaaaaaaaaaaaaaaa

SEQ ID NO: 1038 - protein, 1890 aa, synthetic construct; identical to SEQ ID NO: 1036

SEQ ID NO: 1039 - RNA, 5966 nt, synthetic construct
  source 1..5966: mol_type = other RNA
aggaaataagagagaaaagaagagtaagaagaaatataagagccaccatgaaacggacagccgacggaagcgagttcgagtcaccaaagaagaagcggaaagtcagcgacctcgtgctgggcctcgacatcgggatcggaagcgtcggcgtgggaatcctgaacaaggtcaccggcgagatcatccacaagaacagtagaatcttccctgccgcccaggccgagaacaatgtggagcgcagaattaatagacagggcagaagactgaccagacggaagaagcacagaagagtgcggctgaaccatctgttcgaggagtccggactgatcaccgacttcacaaacgtgagcatcaacctgaacccttatcagctgagagtgaagggcctgaccgacgaactgagcaatgaggagctgttcatcgccctgaagaatatggtcaaacaccggggcatcagctacctggacgacgccagcgatgacggaaacagcagcgtgggcgactacgcccagatcgtgaaagagaacagcaagcagctggaaacaaagacccccggccagatccagctggagcggtaccagaagtacggccaactgcggggagacttcacagtggaagaagacggcaagaagcacagactgattaacgtcttccctaccagcgcctacagggccgaggccctgcggatactgcagacccagcaagagttcaaccctcagattaccgacgaattcatcaactcttacctgcagatcctgaccggaaagaggaagtactaccacggccccggcaacgaaaagagcagaacggattacggaagatacaccacaaagaaagatagcgaggacgagtacatcacgctggacaacatcttcggcatcctgatcggcaagtgcaccttctaccctgaggaatacagagccgccaaggccagctacaccgcccaggagtttaacctgctgaacgatctgaacaacctgacagtgcccaccgagacaaagaaactgtccgaggagcagaagaaccagattatcaccaacgtcaagaacgaaaaggccatgggacccgccaagctgttcaagtacatagccaagctcctgtcctgtgacgtggccgacatcaagggctaccgaatcgacaagtccgataaggccgagatccacaccttcgaggcctacagaaagatgaagaccctggcaacaatagacatagaacaaatggagagagagaacctggacaagctcgcatacgtgctcaccctgaacacagagaaggaaggaatacaggaggccctggagcatgaatttgctgacggaacctttagccaggagcaaatcgacgaactagtgcagttccggaaagccaactcaagcatctttggcaagggctggcacagcttcagcgtcaagctgatgatggagctgatccctgagctgtacgccaccagcgaggagcagatgacaatcctgaccagactgggcaagcaaaagacaaccagcagcagcaacaaaaccaagtacatcgacgagaagcagctgaccgaggaaatctacaatcccgtggccgccaaaagcgtgcgccaggccatcaaaatcgtgaacgccgccatcaaggaatacggcgacttcgacaacattgtgatcgaaatggcaagagagacaaacgaggacgatgaaaagaaggctatccagaaaatccagaaagccaataaggacgagaaagacgccgccatgctgaaggccgccaaccaatataacggcaaggccgagctgcctcacagtgtattccacggccacaagcagctggccaccaagatccggctgtggcaccagcagggcgagagatgcctgtatacaggtaaaaccatcagcatccacgacctgatcaacaacagcaaccagttcgaaatcgatcatatcctgcccctaagcatcacgttcgacgactccctggccaacaaagtgctggtgtacgctaccgcagcccaagagaaaggccagcggaccccttaccaggccctggacagcatggatgacgcctggtccttcagagagctaaaggccttcgtgcgggacagcaaagccctgagcaacaaaaagaaggagtacctgctgacagaggaggacatctccaagttcgacgtgagaaagaagttcatcgagcggaacctggtggacacccggtacgccagcagagtggtgctgaacgcgctacaggagcacttcagagtgcacaagacagacacaaaggtgtctgtggtgagaggccagttcacctcccagctgcggagacactggggcatcgagaaaacaagagacacctaccaccaccacgccgtggatgctctgatcatcgccgcaagcagccagctcaacctgtggaagaagcagaagaacacactggtgagctacagcgaagaccagctgctggacattgaaacgggcgaactgattagcgatgacgagtacaaggaaagcgtgtttaaagccccttaccagcactttgtcgacaccctgaagagtaaggagttcgaggacagcatcctgttctcctaccaagtggacagcaagttcaacagaaagatcagcgacgccaccatctacgccaccagacaggccaaagtgggcaaggacaagaaggacgagacatacgtgctgggcaagatcaaagacatttacagccagaccggatacgacgcctttataaagatatacaaaaaagacaagagcaagttcctgatgtacagacacgaccctcagaccttcgagaaggtgatcgaacctatcctggagaactaccctaacaaagaactgaatgagaagggcaaagaggtaccatgcaacccatttctgaaatacaaggaggaccacggctacatcagaaagtacagcaaaaaaggaaacggccccgaaatcaagagcctgaagtactacgatagcaagctgggcaatcacatagacatcacacccaagaactccaacaacaaggtcgttctgcagagcgtgtccccttggcgggctgacgtgtacttcaataagaccaccggcaaatacgaaatcctgggcctgaagtacgcggacctgaagttcgaaaagggcacaggcacatacaagatcagcgaggaaaagtacaacgacatcaaaatcaaggagggcgtggacagcgacagcgaattcaagttcaccctgtacaagaacgacctgctgctgatcaaggatacggaaacaaaggagcagcaactattccggttcctgagccggaccatgccaaatgtgaagcattacgtagaactgaaaccatacgataaacagaaattcgatgacaacgaggagctgatcaagatcctggggatcgtggccaagggaggccagtgcaagaagggcgtgtccaaaccaaacatcagcatctacaagatcagaaccgacgtgctgggcaaccagcacatcatcaagaacgaaggcgataagcccaagctggacttctccggcggaagctctggtggcagcaagcggaccgccgacggctctgaattcgagagccctaagaagaaaagaaaggtgagcggaggctctagcggcggaagcaccctgaacattgaagacgagtatagactgcatgaaacaagcaaggaacccgacgtgtccctgggctccacctggctgtccgactttccccaggcctgggccgagacaggaggaatgggcctggccgtgcggcaggcacccctgatcatccctctgaaggccacctctacacccgtgagcatcaagcagtaccctatgtctcaggaggccagactgggcatcaagcctcacatccagaggctgctggaccagggcatcctggtgccatgccagagcccctggaacacaccactgctgcccgtgaagaagccaggcaccaatgactatagacccgtgcaggatctgagagaggtgaacaagagggtggaggatatccaccccaccgtgcccaacccttacaatctgctgtccggcctgcccccttctcaccagtggtatacagtgctggacctgaaggatgccttcttttgtctgagactgcaccctaccagccagccactgttcgcctttgagtggagggaccctgagatgggcatctctggccagctgacctggacacgcctgcctcagggcttcaagaatagcccaacactgtttaacgaggccctgcaccgcgacctggcagatttccggatccagcacccagatctgatcctgctgcagtacgtggacgatctgctgctggccgccaccagcgagctggattgccagcagggaacacgcgccctgctgcagaccctgggaaacctgggatatagggcatccgccaagaaggcccagatctgtcagaagcaggtgaagtacctgggctatctgctgaaggagggccagagatggctgacagaggccaggaaggagacagtgatgggccagccaacacccaagaccccaagacagctgagggagttcctgggcaaagcaggattttgcaggctgttcatcccaggattcgcagagatggcagcacctctgtacccactgaccaagccgggcaccctgtttaattggggccctgaccagcagaaggcctatcaggagatcaagcaggccctgctgacagcaccagccctgggcctgccagacctgaccaagcctttcgagctgtttgtggatgagaagcagggctacgccaagggcgtgctgacccagaagctgggaccatggagacggcccgtggcctatctgtccaagaagctggacccagtggcagcaggatggccaccatgcctgaggatggtggcagcaatcgccgtgctgacaaaggatgccggcaagctgaccatgggacagccactggtcatcctggcaccacacgcagtggaggccctggtgaagcagcctccagatcgctggctgtctaacgcccggatgacacactaccaggccctgctgctggacaccgatcgcgtgcagtttggccctgtggtggccctgaatccagccaccctgctgcctctgccagaggagggcctgcagcacaactgtctggacatcctggcagaggcacacggaacaaggccagacctgaccgatcagcccctgcctgacgccgatcacacatggtataccgatggaagctccctgctgcaggagggccagaggaaggcaggagcagcagtgaccacagagacagaagtgatctgggccaaggccctgccagcaggcacatccgcccagcgggccgagctgatcgccctgacccaggccctgaagatggccgagggcaagaagctgaacgtgtacacagactccagatatgccttcgccaccgcacacatccacggagagatctacaggcgccggggctggctgacctctgagggcaaggagatcaagaacaaggatgagatcctggccctgctgaaggccctgtttctgcccaagcggctgagcatcatccactgtcctggacaccagaagggacactccgccgaggcaaggggcaatcggatggccgaccaggccgccagaaaggctgctattactgaaactcccgacacttccactctgctgattgaaaactcctccccttctggcggctcaaaaagaaccgccgacggcagcgaattcgagtctcccaagaagaagaggaaagtcggctctggccctgccgctaagagagtgaagctggactaatagtgagctggagcctcggtggccatgcttcttgccccttgggcctccccccagcccctcctccccttcctgcacccgtacccccgtggtctttgaataaagtctgagtgggcggcaaaaaaaaaaaaaaacaaaaaaaaaaaaaaaaaaaaaaaaaaaccaaaaaaaaaaaaaaaaaaaaaaaaaaaaaaaaaaaccccaaaaaaaaaaaaaaaaaaaaaaaaaaaaaaaaaaaaaaaaaaaaaa

SEQ ID NO: 1040 - protein, 2131 aa, synthetic construct; identical to SEQ ID NO: 4

SEQ ID NO: 1041 - RNA, 6771 nt, synthetic construct
  source 1..6771: mol_type = other RNA
aggataatatacttacatacttactaattaatactaaactcaacgccaccgccaccatgaaacggacagccgacggaagcgagttcgagtcaccaaagaagaagcggaaagtcgacaagaagtacagcatcggcctggacatcggcaccaactctgtgggctgggccgtgatcaccgacgagtacaaggtgcccagcaagaaattcaaggtgctgggcaacaccgaccggcacagcatcaagaagaacctgatcggagccctgctgttcgacagcggcgaaacagccgaggccacccggctgaagagaaccgccagaagaagatacaccagacggaagaaccggatctgctatctgcaagagatcttcagcaacgagatggccaaggtggacgacagcttcttccacagactggaagagtccttcctggtggaagaggataagaagcacgagcggcaccccatcttcggcaacatcgtggacgaggtggcctaccacgagaagtaccccaccatctaccacctgagaaagaaactggtggacagcaccgacaaggccgacctgcggctgatctatctggccctggcccacatgatcaagttccggggccacttcctgatcgagggcgacctgaaccccgacaacagcgacgtggacaagctgttcatccagctggtgcagacctacaaccagctgttcgaggaaaaccccatcaacgccagcggcgtggacgccaaggccatcctgtctgccagactgagcaagagcagaaagctggaaaatctgatcgcccagctgcccggcgagaagaagaatggcctgttcggaaacctgattgccctgagcctgggcctgacccccaacttcaagagcaacttcgacctggccgaggatgccaaactgcagctgagcaaggacacctacgacgacgacctggacaacctgctggcccagatcggcgaccagtacgccgacctgtttctggccgccaagaacctgtccgacgccatcctgctgagcgacatcctgagagtgaacaccgagatcaccaaggcccccctgagcgcctctatgatcaagagatacgacgagcaccaccaggacctgaccctgctgaaagctctcgtgcggcagcagctgcctgagaagtacaaagagattttcttcgaccagagcaagaacggctacgccggctacattgacggcggagccagccaggaagagttctacaagttcatcaagcccatcctggaaaagatggacggcaccgaggaactgctcgtgaagctgaagagagaggacctgctgcggaagcagcggaccttcgacaacggcagcatcccccaccagatccacctgggagagctgcacgccattctgcggcggcaggaagatttttacccattcctgaaggacaaccgggaaaagatcgagaagatcctgaccttccgcatcccctactacgtgggccctctggccaggggaaacagcagattcgcctggatgaccagaaagagcgaggaaaccatcaccccctggaacttcgaggaagtggtggacaagggcgcttccgcccagagcttcatcgagcggatgaccaacttcgataagaacctgcccaacgagaaggtgctgcccaagcacagcctgctgtacgagtacttcaccgtgtataacgagctgaccaaagtgaaatacgtgaccgagggaatgagaaagcccgccttcctgagcggcgagcagaaaaaggccatcgtggacctgctgttcaagaccaaccggaaagtgaccgtgaagcagctgaaagaggactacttcaagaaaatcgagtgcttcgactccgtggaaatctccggcgtggaagatcggttcaacgcctccctgggcacataccacgatctgctgaaaattatcaaggacaaggacttcctggacaatgaggaaaacgaggacattctggaagatatcgtgctgaccctgacactgtttgaggacagagagatgatcgaggaacggctgaaaacctatgcccacctgttcgacgacaaagtgatgaagcagctgaagcggcggagatacaccggctggggcaggctgagccggaagctgatcaacggcatccgggacaagcagtccggcaagacaatcctggatttcctgaagtccgacggcttcgccaacagaaacttcatgcagctgatccacgacgacagcctgacctttaaagaggacatccagaaagcccaggtgtccggccagggcgatagcctgcacgagcacattgccaatctggccggcagccccgccattaagaagggcatcctgcagacagtgaaggtggtggacgagctcgtgaaagtgatgggccggcacaagcccgagaacatcgtgatcgaaatggccagagagaaccagaccacccagaagggacagaagaacagccgcgagagaatgaagcggatcgaagagggcatcaaagagctgggcagccagatcctgaaagaacaccccgtggaaaacacccagctgcagaacgagaagctgtacctgtactacctgcagaatgggcgggatatgtacgtggaccaggaactggacatcaaccggctgtccgactacgatgtggacgctatcgtgcctcagagctttctgaaggacgactccatcgacaacaaggtgctgaccagaagcgacaagaaccggggcaagagcgacaacgtgccctccgaagaggtcgtgaagaagatgaagaactactggcggcagctgctgaacgccaagctgattacccagagaaagttcgacaatctgaccaaggccgagagaggcggcctgagcgaactggataaggccggcttcatcaagagacagctggtggaaacccggcagatcacaaagcacgtggcacagatcctggactcccggatgaacactaagtacgacgagaatgacaagctgatccgggaagtgaaagtgatcaccctgaagtccaagctggtgtccgatttccggaaggatttccagttttacaaagtgcgcgagatcaacaactaccaccacgcccacgacgcctacctgaacgccgtcgtgggaaccgccctgatcaaaaagtaccctaagctggaaagcgagttcgtgtacggcgactacaaggtgtacgacgtgcggaagatgatcgccaagagcgagcaggaaatcggcaaggctaccgccaagtacttcttctacagcaacatcatgaactttttcaagaccgagattaccctggccaacggcgagatccggaagcggcctctgatcgagacaaacggcgaaaccggggagatcgtgtgggataagggccgggattttgccaccgtgcggaaagtgctgagcatgccccaagtgaatatcgtgaaaaagaccgaggtgcagacaggcggcttcagcaaagagtctatcctgcccaagaggaacagcgataagctgatcgccagaaagaaggactgggaccctaagaagtacggcggcttcgacagccccaccgtggcctattctgtgctggtggtggccaaagtggaaaagggcaagtccaagaaactgaagagtgtgaaagagctgctggggatcaccatcatggaaagaagcagcttcgagaagaatcccatcgactttctggaagccaagggctacaaagaagtgaaaaaggacctgatcatcaagctgcctaagtactccctgttcgagctggaaaacggccggaagagaatgctggcctctgccggcgaactgcagaagggaaacgaactggccctgccctccaaatatgtgaacttcctgtacctggccagccactatgagaagctgaagggctcccccgaggataatgagcagaaacagctgtttgtggaacagcacaagcactacctggacgagatcatcgagcagatcagcgagttctccaagagagtgatcctggccgacgctaatctggacaaagtgctgtccgcctacaacaagcaccgggataagcccatcagagagcaggccgagaatatcatccacctgtttaccctgaccaatctgggagcccctgccgccttcaagtactttgacaccaccatcgaccggaagaggtacaccagcaccaaagaggtgctggacgccaccctgatccaccagagcatcaccggcctgtacgagacacggatcgacctgtctcagctgggaggtgactccggcggaagctctggtggcagcaagcggaccgccgacggctctgaattcgagagccctaagaagaaaagaaaggtgagcggaggctctagcggcggaagcaccctgaacattgaagacgagtatagactgcatgaaacaagcaaggaacccgacgtgtccctgggctccacctggctgtccgactttccccaggcctgggccgagacaggaggaatgggcctggccgtgcggcaggcacccctgatcatccctctgaaggccacctctacacccgtgagcatcaagcagtaccctatgtctcaggaggccagactgggcatcaagcctcacatccagaggctgctggaccagggcatcctggtgccatgccagagcccctggaacacaccactgctgcccgtgaagaagccaggcaccaatgactatagacccgtgcaggatctgagagaggtgaacaagagggtggaggatatccaccccaccgtgcccaacccttacaatctgctgtccggcctgcccccttctcaccagtggtatacagtgctggacctgaaggatgccttcttttgtctgagactgcaccctaccagccagccactgttcgcctttgagtggagggaccctgagatgggcatctctggccagctgacctggacacgcctgcctcagggcttcaagaatagcccaacactgtttaacgaggccctgcaccgcgacctggcagatttccggatccagcacccagatctgatcctgctgcagtacgtggacgatctgctgctggccgccaccagcgagctggattgccagcagggaacacgcgccctgctgcagaccctgggaaacctgggatatagggcatccgccaagaaggcccagatctgtcagaagcaggtgaagtacctgggctatctgctgaaggagggccagagatggctgacagaggccaggaaggagacagtgatgggccagccaacacccaagaccccaagacagctgagggagttcctgggcaaagcaggattttgcaggctgttcatcccaggattcgcagagatggcagcacctctgtacccactgaccaagccgggcaccctgtttaattggggccctgaccagcagaaggcctatcaggagatcaagcaggccctgctgacagcaccagccctgggcctgccagacctgaccaagcctttcgagctgtttgtggatgagaagcagggctacgccaagggcgtgctgacccagaagctgggaccatggagacggcccgtggcctatctgtccaagaagctggacccagtggcagcaggatggccaccatgcctgaggatggtggcagcaatcgccgtgctgacaaaggatgccggcaagctgaccatgggacagccactggtcatcctggcaccacacgcagtggaggccctggtgaagcagcctccagatcgctggctgtctaacgcccggatgacacactaccaggccctgctgctggacaccgatcgcgtgcagtttggccctgtggtggccctgaatccagccaccctgctgcctctgccagaggagggcctgcagcacaactgtctggacatcctggcagaggcacacggaacaaggccagacctgaccgatcagcccctgcctgacgccgatcacacatggtataccgatggaagctccctgctgcaggagggccagaggaaggcaggagcagcagtgaccacagagacagaagtgatctgggccaaggccctgccagcaggcacatccgcccagcgggccgagctgatcgccctgacccaggccctgaagatggccgagggcaagaagctgaacgtgtacacagactccagatatgccttcgccaccgcacacatccacggagagatctacaggcgccggggctggctgacctctgagggcaaggagatcaagaacaaggatgagatcctggccctgctgaaggccctgtttctgcccaagcggctgagcatcatccactgtcctggacaccagaagggacactccgccgaggcaaggggcaatcggatggccgaccaggccgccagaaaggctgctattactgaaactcccgacacttccactctgctgattgaaaactcctccccttctggcggctcaaaaagaaccgccgacggcagcgaattcgagtctcccaagaagaagaggaaagtcggctctggccctgccgctaagagagtgaagctggactgataagctggagcctcggtggccatgcttcttgccccttgggcctccccccagcccctcctccccttcctgcacccgtacccccgtggtctttgaataaagtctgagtgggcggcgtcatgaaggtttttcttttcctgagaaaacaagaaattgttttctcaggttttgctttttgaaaaaaaagcaaaacaaaaaaaaaaaaaaataaaaaaaaaaaaaaaaaaaaaaaaaaattaaaaaaaaaaaaaaaaaaaaaaaaaaaaaaaaaaattttaaaaaaaaaaaaaaaaaaaaaaaaaaaaaaaaaaaaaaaaaaaaa

SEQ ID NO: 1042 - protein, 2140 aa, synthetic construct
MKRTADGSEFESPKKKRKVDKKYSIGLDIGTNSVGWAVITDEYKVPSKKFKVLGNTDRHSIKKNLIGALLFDSGETAEATRLKRTARRRYTRRKNRICYLQEIFSNEMAKVDDSFFHRLEESFLVEEDKKHERHPIFGNIVDEVAYHEKYPTIYHLRKKLVDSTDKADLRLIYLALAHMIKFRGHFLIEGDLNPDNSDVDKLFIQLVQTYNQLFEENPINASGVDAKAILSARLSKSRKLENLIAQLPGEKKNGLFGNLIALSLGLTPNFKSNFDLAEDAKLQLSKDTYDDDLDNLLAQIGDQYADLFLAAKNLSDAILLSDILRVNTEITKAPLSASMIKRYDEHHQDLTLLKALVRQQLPEKYKEIFFDQSKNGYAGYIDGGASQEEFYKFIKPILEKMDGTEELLVKLKREDLLRKQRTFDNGSIPHQIHLGELHAILRRQEDFYPFLKDNREKIEKILTFRIPYYVGPLARGNSRFAWMTRKSEETITPWNFEEVVDKGASAQSFIERMTNFDKNLPNEKVLPKHSLLYEYFTVYNELTKVKYVTEGMRKPAFLSGEQKKAIVDLLFKTNRKVTVKQLKEDYFKKIECFDSVEISGVEDRFNASLGTYHDLLKIIKDKDFLDNEENEDILEDIVLTLTLFEDREMIEERLKTYAHLFDDKVMKQLKRRRYTGWGRLSRKLINGIRDKQSGKTILDFLKSDGFANRNFMQLIHDDSLTFKEDIQKAQVSGQGDSLHEHIANLAGSPAIKKGILQTVKVVDELVKVMGRHKPENIVIEMARENQTTQKGQKNSRERMKRIEEGIKELGSQILKEHPVENTQLQNEKLYLYYLQNGRDMYVDQELDINRLSDYDVDAIVPQSFLKDDSIDNKVLTRSDKNRGKSDNVPSEEVVKKMKNYWRQLLNAKLITQRKFDNLTKAERGGLSELDKAGFIKRQLVETRQITKHVAQILDSRMNTKYDENDKLIREVKVITLKSKLVSDFRKDFQFYKVREINNYHHAHDAYLNAVVGTALIKKYPKLESEFVYGDYKVYDVRKMIAKSEQEIGKATAKYFFYSNIMNFFKTEITLANGEIRKRPLIETNGETGEIVWDKGRDFATVRKVLSMPQVNIVKKTEVQTGGFSKESILPKRNSDKLIARKKDWDPKKYGGFDSPTVAYSVLVVAKVEKGKSKKLKSVKELLGITIMERSSFEKNPIDFLEAKGYKEVKKDLIIKLPKYSLFELENGRKRMLASAGELQKGNELALPSKYVNFLYLASHYEKLKGSPEDNEQKQLFVEQHKHYLDEIIEQISEFSKRVILADANLDKVLSAYNKHRDKPIREQAENIIHLFTLTNLGAPAAFKYFDTTIDRKRYTSTKEVLDATLIHQSITGLYETRIDLSQLGGDAPAPAPPAPAPPAPAPPAPAPPAPAPPAPAPPAPAPPAPAPAATLNIEDEYRLHETSKEPDVSLGSTWLSDFPQAWAETGGMGLAVRQAPLIIPLKATSTPVSIKQYPMSQEARLGIKPHIQRLLDQGILVPCQSPWNTPLLPVKKPGTNDYRPVQDLREVNKRVEDIHPTVPNPYNLLSGLPPSHQWYTVLDLKDAFFCLRLHPTSQPLFAFEWRDPEMGISGQLTWTRLPQGFKNSPTLFNEALHRDLADFRIQHPDLILLQYVDDLLLAATSELDCQQGTRALLQTLGNLGYRASAKKAQICQKQVKYLGYLLKEGQRWLTEARKETVMGQPTPKTPRQLREFLGKAGFCRLFIPGFAEMAAPLYPLTKPGTLFNWGPDQQKAYQEIKQALLTAPALGLPDLTKPFELFVDEKQGYAKGVLTQKLGPWRRPVAYLSKKLDPVAAGWPPCLRMVAAIAVLTKDAGKLTMGQPLVILAPHAVEALVKQPPDRWLSNARMTHYQALLLDTDRVQFGPVVALNPATLLPLPEEGLQHNCLDILAEAHGTRPDLTDQPLPDADHTWYTDGSSLLQEGQRKAGAAVTTETEVIWAKALPAGTSAQRAELIALTQALKMAEGKKLNVYTDSRYAFATAHIHGEIYRRRGWLTSEGKEIKNKDEILALLKALFLPKRLSIIHCPGHQKGHSAEARGNRMADQAARKAAITETPDTSTLLIENSSPSGGSKRTADGSEFESPKKKRKVGSGPAAKRVKLD

SEQ ID NO: 1043 - RNA, 7301 nt, synthetic construct
  source 1..7301: mol_type = other RNA
aggaaataagagagaaaagaagagtaagaagaaatataagagccaccatgaaacggacagccgacggaagcgagttcgagtcaccaaagaagaagcggaaagtcgacaagaagtacagcatcggcctggacatcggcaccaactctgtgggctgggccgtgatcaccgacgagtacaaggtgcccagcaagaaattcaaggtgctgggcaacaccgaccggcacagcatcaagaagaacctgatcggagccctgctgttcgacagcggcgaaacagccgaggccacccggctgaagagaaccgccagaagaagatacaccagacggaagaaccggatctgctatctgcaagagatcttcagcaacgagatggccaaggtggacgacagcttcttccacagactggaagagtccttcctggtggaagaggataagaagcacgagcggcaccccatcttcggcaacatcgtggacgaggtggcctaccacgagaagtaccccaccatctaccacctgagaaagaaactggtggacagcaccgacaaggccgacctgcggctgatctatctggccctggcccacatgatcaagttccggggccacttcctgatcgagggcgacctgaaccccgacaacagcgacgtggacaagctgttcatccagctggtgcagacctacaaccagctgttcgaggaaaaccccatcaacgccagcggcgtggacgccaaggccatcctgtctgccagactgagcaagagcagaaagctggaaaatctgatcgcccagctgcccggcgagaagaagaatggcctgttcggaaacctgattgccctgagcctgggcctgacccccaacttcaagagcaacttcgacctggccgaggatgccaaactgcagctgagcaaggacacctacgacgacgacctggacaacctgctggcccagatcggcgaccagtacgccgacctgtttctggccgccaagaacctgtccgacgccatcctgctgagcgacatcctgagagtgaacaccgagatcaccaaggcccccctgagcgcctctatgatcaagagatacgacgagcaccaccaggacctgaccctgctgaaagctctcgtgcggcagcagctgcctgagaagtacaaagagattttcttcgaccagagcaagaacggctacgccggctacattgacggcggagccagccaggaagagttctacaagttcatcaagcccatcctggaaaagatggacggcaccgaggaactgctcgtgaagctgaagagagaggacctgctgcggaagcagcggaccttcgacaacggcagcatcccccaccagatccacctgggagagctgcacgccattctgcggcggcaggaagatttttacccattcctgaaggacaaccgggaaaagatcgagaagatcctgaccttccgcatcccctactacgtgggccctctggccaggggaaacagcagattcgcctggatgaccagaaagagcgaggaaaccatcaccccctggaacttcgaggaagtggtggacaagggcgcttccgcccagagcttcatcgagcggatgaccaacttcgataagaacctgcccaacgagaaggtgctgcccaagcacagcctgctgtacgagtacttcaccgtgtataacgagctgaccaaagtgaaatacgtgaccgagggaatgagaaagcccgccttcctgagcggcgagcagaaaaaggccatcgtggacctgctgttcaagaccaaccggaaagtgaccgtgaagcagctgaaagaggactacttcaagaaaatcgagtgcttcgactccgtggaaatctccggcgtggaagatcggttcaacgcctccctgggcacataccacgatctgctgaaaattatcaaggacaaggacttcctggacaatgaggaaaacgaggacattctggaagatatcgtgctgaccctgacactgtttgaggacagagagatgatcgaggaacggctgaaaacctatgcccacctgttcgacgacaaagtgatgaagcagctgaagcggcggagatacaccggctggggcaggctgagccggaagctgatcaacggcatccgggacaagcagtccggcaagacaatcctggatttcctgaagtccgacggcttcgccaacagaaacttcatgcagctgatccacgacgacagcctgacctttaaagaggacatccagaaagcccaggtgtccggccagggcgatagcctgcacgagcacattgccaatctggccggcagccccgccattaagaagggcatcctgcagacagtgaaggtggtggacgagctcgtgaaagtgatgggccggcacaagcccgagaacatcgtgatcgaaatggccagagagaaccagaccacccagaagggacagaagaacagccgcgagagaatgaagcggatcgaagagggcatcaaagagctgggcagccagatcctgaaagaacaccccgtggaaaacacccagctgcagaacgagaagctgtacctgtactacctgcagaatgggcgggatatgtacgtggaccaggaactggacatcaaccggctgtccgactacgatgtggacgctatcgtgcctcagagctttctgaaggacgactccatcgacaacaaggtgctgaccagaagcgacaagaaccggggcaagagcgacaacgtgccctccgaagaggtcgtgaagaagatgaagaactactggcggcagctgctgaacgccaagctgattacccagagaaagttcgacaatctgaccaaggccgagagaggcggcctgagcgaactggataaggccggcttcatcaagagacagctggtggaaacccggcagatcacaaagcacgtggcacagatcctggactcccggatgaacactaagtacgacgagaatgacaagctgatccgggaagtgaaagtgatcaccctgaagtccaagctggtgtccgatttccggaaggatttccagttttacaaagtgcgcgagatcaacaactaccaccacgcccacgacgcctacctgaacgccgtcgtgggaaccgccctgatcaaaaagtaccctaagctggaaagcgagttcgtgtacggcgactacaaggtgtacgacgtgcggaagatgatcgccaagagcgagcaggaaatcggcaaggctaccgccaagtacttcttctacagcaacatcatgaactttttcaagaccgagattaccctggccaacggcgagatccggaagcggcctctgatcgagacaaacggcgaaaccggggagatcgtgtgggataagggccgggattttgccaccgtgcggaaagtgctgagcatgccccaagtgaatatcgtgaaaaagaccgaggtgcagacaggcggcttcagcaaagagtctatcctgcccaagaggaacagcgataagctgatcgccagaaagaaggactgggaccctaagaagtacggcggcttcgacagccccaccgtggcctattctgtgctggtggtggccaaagtggaaaagggcaagtccaagaaactgaagagtgtgaaagagctgctggggatcaccatcatggaaagaagcagcttcgagaagaatcccatcgactttctggaagccaagggctacaaagaagtgaaaaaggacctgatcatcaagctgcctaagtactccctgttcgagctggaaaacggccggaagagaatgctggcctctgccggcgaactgcagaagggaaacgaactggccctgccctccaaatatgtgaacttcctgtacctggccagccactatgagaagctgaagggctcccccgaggataatgagcagaaacagctgtttgtggaacagcacaagcactacctggacgagatcatcgagcagatcagcgagttctccaagagagtgatcctggccgacgctaatctggacaaagtgctgtccgcctacaacaagcaccgggataagcccatcagagagcaggccgagaatatcatccacctgtttaccctgaccaatctgggagcccctgccgccttcaagtactttgacaccaccatcgaccggaagaggtacaccagcaccaaagaggtgctggacgccaccctgatccaccagagcatcaccggcctgtacgagacacggatcgacctgtctcagctgggaggtgacgcccctgctcctgctcctcctgcaccagctccgccagctccagcacctccggctccggcaccaccagctccagctccgcctgctcctgctcctccagctccggctcctccggcaccagcacctgccgctaccctgaacattgaagacgagtatagactgcatgaaacaagcaaggaacccgacgtgtccctgggctccacctggctgtccgactttccccaggcctgggccgagacaggaggaatgggcctggccgtgcggcaggcacccctgatcatccctctgaaggccacctctacacccgtgagcatcaagcagtaccctatgtctcaggaggccagactgggcatcaagcctcacatccagaggctgctggaccagggcatcctggtgccatgccagagcccctggaacacaccactgctgcccgtgaagaagccaggcaccaatgactatagacccgtgcaggatctgagagaggtgaacaagagggtggaggatatccaccccaccgtgcccaacccttacaatctgctgtccggcctgcccccttctcaccagtggtatacagtgctggacctgaaggatgccttcttttgtctgagactgcaccctaccagccagccactgttcgcctttgagtggagggaccctgagatgggcatctctggccagctgacctggacacgcctgcctcagggcttcaagaatagcccaacactgtttaacgaggccctgcaccgcgacctggcagatttccggatccagcacccagatctgatcctgctgcagtacgtggacgatctgctgctggccgccaccagcgagctggattgccagcagggaacacgcgccctgctgcagaccctgggaaacctgggatatagggcatccgccaagaaggcccagatctgtcagaagcaggtgaagtacctgggctatctgctgaaggagggccagagatggctgacagaggccaggaaggagacagtgatgggccagccaacacccaagaccccaagacagctgagggagttcctgggcaaagcaggattttgcaggctgttcatcccaggattcgcagagatggcagcacctctgtacccactgaccaagccgggcaccctgtttaattggggccctgaccagcagaaggcctatcaggagatcaagcaggccctgctgacagcaccagccctgggcctgccagacctgaccaagcctttcgagctgtttgtggatgagaagcagggctacgccaagggcgtgctgacccagaagctgggaccatggagacggcccgtggcctatctgtccaagaagctggacccagtggcagcaggatggccaccatgcctgaggatggtggcagcaatcgccgtgctgacaaaggatgccggcaagctgaccatgggacagccactggtcatcctggcaccacacgcagtggaggccctggtgaagcagcctccagatcgctggctgtctaacgcccggatgacacactaccaggccctgctgctggacaccgatcgcgtgcagtttggccctgtggtggccctgaatccagccaccctgctgcctctgccagaggagggcctgcagcacaactgtctggacatcctggcagaggcacacggaacaaggccagacctgaccgatcagcccctgcctgacgccgatcacacatggtataccgatggaagctccctgctgcaggagggccagaggaaggcaggagcagcagtgaccacagagacagaagtgatctgggccaaggccctgccagcaggcacatccgcccagcgggccgagctgatcgccctgacccaggccctgaagatggccgagggcaagaagctgaacgtgtacacagactccagatatgccttcgccaccgcacacatccacggagagatctacaggcgccggggctggctgacctctgagggcaaggagatcaagaacaaggatgagatcctggccctgctgaaggccctgtttctgcccaagcggctgagcatcatccactgtcctggacaccagaagggacactccgccgaggcaaggggcaatcggatggccgaccaggccgccagaaaggctgctattactgaaactcccgacacttccactctgctgattgaaaactcctccccttctggcggctcaaaaagaaccgccgacggcagcgaattcgagtctcccaagaagaagaggaaagtcggctctggccctgccgctaagagagtgaagctggactgagctggagcctcggtggccatgcttcttgccccttgggcctccccccagcccctcctccccttcctgcacccgtacccccgtggtctttgaataaagtctgagtgggcggcaatcaacctctggattacaaaatttgtgaaagattgactgatattcttaactatgttgctccttttacgctgtgtggatatgctgctttaatgcctctgtatcatgctattgcttcccgtacggctttcgttttctcctccttgtataaatcctggttgctgtctctttatgaggagttgtggcccgttgtccgtcaacgtggcgtggtgtgctctgtgtttgctgacgcaacccccactggctggggcattgccaccacctgtcaactcctttctgggactttcgctttccccctcccgatcgccacggcagaactcatcgccgcctgccttgcccgctgctggacaggggctaggttgctgggcactgataattccgtggtgttgtcggggaagctgacgtcctttccagggctgctcgcctgtgttgccaactggatcctgcgcgggacgtccttctgctacgtcccttcggctctcaatccagcggacctcccttcccgaggccttctgccggttctgcggcctctcccgcgtcttcgctttcggcctccgacgagtcggatctccctttgggccgcctccccgcctgaaaaaaaaaaaaaaataaaaaaaaaaaaaaaaaaaaaaaaaaattaaaaaaaaaaaaaaaaaaaaaaaaaaaaaaaaaaattttaaaaaaaaaaaaaaaaaaaaaaaaaaaaaaaaaaaaaaaaaaaaa

SEQ ID NO: 1044 - protein, 2131 aa, synthetic construct; identical to SEQ ID NO: 4

SEQ ID NO: 1045 - RNA, 7274 nt, synthetic construct
  source 1..7274: mol_type = other RNA
aggaaataagagagaaaagaagagtaagaagaaatataagagccaccatgaaacggacagccgacggaagcgagttcgagtcaccaaagaagaagcggaaagtcgacaagaagtacagcatcggcctggacatcggcaccaactctgtgggctgggccgtgatcaccgacgagtacaaggtgcccagcaagaaattcaaggtgctgggcaacaccgaccggcacagcatcaagaagaacctgatcggagccctgctgttcgacagcggcgaaacagccgaggccacccggctgaagagaaccgccagaagaagatacaccagacggaagaaccggatctgctatctgcaagagatcttcagcaacgagatggccaaggtggacgacagcttcttccacagactggaagagtccttcctggtggaagaggataagaagcacgagcggcaccccatcttcggcaacatcgtggacgaggtggcctaccacgagaagtaccccaccatctaccacctgagaaagaaactggtggacagcaccgacaaggccgacctgcggctgatctatctggccctggcccacatgatcaagttccggggccacttcctgatcgagggcgacctgaaccccgacaacagcgacgtggacaagctgttcatccagctggtgcagacctacaaccagctgttcgaggaaaaccccatcaacgccagcggcgtggacgccaaggccatcctgtctgccagactgagcaagagcagaaagctggaaaatctgatcgcccagctgcccggcgagaagaagaatggcctgttcggaaacctgattgccctgagcctgggcctgacccccaacttcaagagcaacttcgacctggccgaggatgccaaactgcagctgagcaaggacacctacgacgacgacctggacaacctgctggcccagatcggcgaccagtacgccgacctgtttctggccgccaagaacctgtccgacgccatcctgctgagcgacatcctgagagtgaacaccgagatcaccaaggcccccctgagcgcctctatgatcaagagatacgacgagcaccaccaggacctgaccctgctgaaagctctcgtgcggcagcagctgcctgagaagtacaaagagattttcttcgaccagagcaagaacggctacgccggctacattgacggcggagccagccaggaagagttctacaagttcatcaagcccatcctggaaaagatggacggcaccgaggaactgctcgtgaagctgaagagagaggacctgctgcggaagcagcggaccttcgacaacggcagcatcccccaccagatccacctgggagagctgcacgccattctgcggcggcaggaagatttttacccattcctgaaggacaaccgggaaaagatcgagaagatcctgaccttccgcatcccctactacgtgggccctctggccaggggaaacagcagattcgcctggatgaccagaaagagcgaggaaaccatcaccccctggaacttcgaggaagtggtggacaagggcgcttccgcccagagcttcatcgagcggatgaccaacttcgataagaacctgcccaacgagaaggtgctgcccaagcacagcctgctgtacgagtacttcaccgtgtataacgagctgaccaaagtgaaatacgtgaccgagggaatgagaaagcccgccttcctgagcggcgagcagaaaaaggccatcgtggacctgctgttcaagaccaaccggaaagtgaccgtgaagcagctgaaagaggactacttcaagaaaatcgagtgcttcgactccgtggaaatctccggcgtggaagatcggttcaacgcctccctgggcacataccacgatctgctgaaaattatcaaggacaaggacttcctggacaatgaggaaaacgaggacattctggaagatatcgtgctgaccctgacactgtttgaggacagagagatgatcgaggaacggctgaaaacctatgcccacctgttcgacgacaaagtgatgaagcagctgaagcggcggagatacaccggctggggcaggctgagccggaagctgatcaacggcatccgggacaagcagtccggcaagacaatcctggatttcctgaagtccgacggcttcgccaacagaaacttcatgcagctgatccacgacgacagcctgacctttaaagaggacatccagaaagcccaggtgtccggccagggcgatagcctgcacgagcacattgccaatctggccggcagccccgccattaagaagggcatcctgcagacagtgaaggtggtggacgagctcgtgaaagtgatgggccggcacaagcccgagaacatcgtgatcgaaatggccagagagaaccagaccacccagaagggacagaagaacagccgcgagagaatgaagcggatcgaagagggcatcaaagagctgggcagccagatcctgaaagaacaccccgtggaaaacacccagctgcagaacgagaagctgtacctgtactacctgcagaatgggcgggatatgtacgtggaccaggaactggacatcaaccggctgtccgactacgatgtggacgctatcgtgcctcagagctttctgaaggacgactccatcgacaacaaggtgctgaccagaagcgacaagaaccggggcaagagcgacaacgtgccctccgaagaggtcgtgaagaagatgaagaactactggcggcagctgctgaacgccaagctgattacccagagaaagttcgacaatctgaccaaggccgagagaggcggcctgagcgaactggataaggccggcttcatcaagagacagctggtggaaacccggcagatcacaaagcacgtggcacagatcctggactcccggatgaacactaagtacgacgagaatgacaagctgatccgggaagtgaaagtgatcaccctgaagtccaagctggtgtccgatttccggaaggatttccagttttacaaagtgcgcgagatcaacaactaccaccacgcccacgacgcctacctgaacgccgtcgtgggaaccgccctgatcaaaaagtaccctaagctggaaagcgagttcgtgtacggcgactacaaggtgtacgacgtgcggaagatgatcgccaagagcgagcaggaaatcggcaaggctaccgccaagtacttcttctacagcaacatcatgaactttttcaagaccgagattaccctggccaacggcgagatccggaagcggcctctgatcgagacaaacggcgaaaccggggagatcgtgtgggataagggccgggattttgccaccgtgcggaaagtgctgagcatgccccaagtgaatatcgtgaaaaagaccgaggtgcagacaggcggcttcagcaaagagtctatcctgcccaagaggaacagcgataagctgatcgccagaaagaaggactgggaccctaagaagtacggcggcttcgacagccccaccgtggcctattctgtgctggtggtggccaaagtggaaaagggcaagtccaagaaactgaagagtgtgaaagagctgctggggatcaccatcatggaaagaagcagcttcgagaagaatcccatcgactttctggaagccaagggctacaaagaagtgaaaaaggacctgatcatcaagctgcctaagtactccctgttcgagctggaaaacggccggaagagaatgctggcctctgccggcgaactgcagaagggaaacgaactggccctgccctccaaatatgtgaacttcctgtacctggccagccactatgagaagctgaagggctcccccgaggataatgagcagaaacagctgtttgtggaacagcacaagcactacctggacgagatcatcgagcagatcagcgagttctccaagagagtgatcctggccgacgctaatctggacaaagtgctgtccgcctacaacaagcaccgggataagcccatcagagagcaggccgagaatatcatccacctgtttaccctgaccaatctgggagcccctgccgccttcaagtactttgacaccaccatcgaccggaagaggtacaccagcaccaaagaggtgctggacgccaccctgatccaccagagcatcaccggcctgtacgagacacggatcgacctgtctcagctgggaggtgactccggcggaagctctggtggcagcaagcggaccgccgacggctctgaattcgagagccctaagaagaaaagaaaggtgagcggaggctctagcggcggaagcaccctgaacattgaagacgagtatagactgcatgaaacaagcaaggaacccgacgtgtccctgggctccacctggctgtccgactttccccaggcctgggccgagacaggaggaatgggcctggccgtgcggcaggcacccctgatcatccctctgaaggccacctctacacccgtgagcatcaagcagtaccctatgtctcaggaggccagactgggcatcaagcctcacatccagaggctgctggaccagggcatcctggtgccatgccagagcccctggaacacaccactgctgcccgtgaagaagccaggcaccaatgactatagacccgtgcaggatctgagagaggtgaacaagagggtggaggatatccaccccaccgtgcccaacccttacaatctgctgtccggcctgcccccttctcaccagtggtatacagtgctggacctgaaggatgccttcttttgtctgagactgcaccctaccagccagccactgttcgcctttgagtggagggaccctgagatgggcatctctggccagctgacctggacacgcctgcctcagggcttcaagaatagcccaacactgtttaacgaggccctgcaccgcgacctggcagatttccggatccagcacccagatctgatcctgctgcagtacgtggacgatctgctgctggccgccaccagcgagctggattgccagcagggaacacgcgccctgctgcagaccctgggaaacctgggatatagggcatccgccaagaaggcccagatctgtcagaagcaggtgaagtacctgggctatctgctgaaggagggccagagatggctgacagaggccaggaaggagacagtgatgggccagccaacacccaagaccccaagacagctgagggagttcctgggcaaagcaggattttgcaggctgttcatcccaggattcgcagagatggcagcacctctgtacccactgaccaagccgggcaccctgtttaattggggccctgaccagcagaaggcctatcaggagatcaagcaggccctgctgacagcaccagccctgggcctgccagacctgaccaagcctttcgagctgtttgtggatgagaagcagggctacgccaagggcgtgctgacccagaagctgggaccatggagacggcccgtggcctatctgtccaagaagctggacccagtggcagcaggatggccaccatgcctgaggatggtggcagcaatcgccgtgctgacaaaggatgccggcaagctgaccatgggacagccactggtcatcctggcaccacacgcagtggaggccctggtgaagcagcctccagatcgctggctgtctaacgcccggatgacacactaccaggccctgctgctggacaccgatcgcgtgcagtttggccctgtggtggccctgaatccagccaccctgctgcctctgccagaggagggcctgcagcacaactgtctggacatcctggcagaggcacacggaacaaggccagacctgaccgatcagcccctgcctgacgccgatcacacatggtataccgatggaagctccctgctgcaggagggccagaggaaggcaggagcagcagtgaccacagagacagaagtgatctgggccaaggccctgccagcaggcacatccgcccagcgggccgagctgatcgccctgacccaggccctgaagatggccgagggcaagaagctgaacgtgtacacagactccagatatgccttcgccaccgcacacatccacggagagatctacaggcgccggggctggctgacctctgagggcaaggagatcaagaacaaggatgagatcctggccctgctgaaggccctgtttctgcccaagcggctgagcatcatccactgtcctggacaccagaagggacactccgccgaggcaaggggcaatcggatggccgaccaggccgccagaaaggctgctattactgaaactcccgacacttccactctgctgattgaaaactcctccccttctggcggctcaaaaagaaccgccgacggcagcgaattcgagtctcccaagaagaagaggaaagtcggctctggccctgccgctaagagagtgaagctggactgagctggagcctcggtggccatgcttcttgccccttgggcctccccccagcccctcctccccttcctgcacccgtacccccgtggtctttgaataaagtctgagtgggcggcaatcaacctctggattacaaaatttgtgaaagattgactgatattcttaactatgttgctccttttacgctgtgtggatatgctgctttaatgcctctgtatcatgctattgcttcccgtacggctttcgttttctcctccttgtataaatcctggttgctgtctctttatgaggagttgtggcccgttgtccgtcaacgtggcgtggtgtgctctgtgtttgctgacgcaacccccactggctggggcattgccaccacctgtcaactcctttctgggactttcgctttccccctcccgatcgccacggcagaactcatcgccgcctgccttgcccgctgctggacaggggctaggttgctgggcactgataattccgtggtgttgtcggggaagctgacgtcctttccagggctgctcgcctgtgttgccaactggatcctgcgcgggacgtccttctgctacgtcccttcggctctcaatccagcggacctcccttcccgaggccttctgccggttctgcggcctctcccgcgtcttcgctttcggcctccgacgagtcggatctccctttgggccgcctccccgcctgaaaaaaaaaaaaaaataaaaaaaaaaaaaaaaaaaaaaaaaaattaaaaaaaaaaaaaaaaaaaaaaaaaaaaaaaaaaattttaaaaaaaaaaaaaaaaaaaaaaaaaaaaaaaaaaaaaaaaaaaaa

SEQ ID NO: 1046 - RNA, 118 nt, synthetic construct; identical to SEQ ID NO: 351
  source 1..118: mol_type = other RNA

SEQ ID NO: 1047 - RNA, 118 nt, synthetic construct; identical to SEQ ID NO: 351
  modified_base 1: mod_base = um
  modified_base 2: mod_base = OTHER; note = Phosphorothioate (PS) linkage
  modified_base 2: mod_base = OTHER; note = 2'-O-methyladenosine
  modified_base 3: mod_base = OTHER; note = Phosphorothioate (PS) linkage
  modified_base 3: mod_base = gm
  modified_base 4: mod_base = OTHER; note = Phosphorothioate (PS) linkage
  modified_base 29: mod_base = gm
  modified_base 30: mod_base = cm
  modified_base 31: mod_base = um
  modified_base 32: mod_base = OTHER; note = 2'-O-methyladenosine
  modified_base 33: mod_base = gm
  modified_base 34: mod_base = OTHER; note = 2'-O-methyladenosine
  modified_base 35: mod_base = OTHER; note = 2'-O-methyladenosine
  modified_base 36: mod_base = OTHER; note = 2'-O-methyladenosine
  modified_base 37: mod_base = um
  modified_base 38: mod_base = OTHER; note = 2'-O-methyladenosine
  modified_base 39: mod_base = gm
  modified_base 70: mod_base = cm
  modified_base 71: mod_base = um
  modified_base 72: mod_base = um
  modified_base 73: mod_base = gm
  modified_base 74: mod_base = OTHER; note = 2'-O-methyladenosine
  modified_base 75: mod_base = OTHER; note = 2'-O-methyladenosine
  modified_base 78: mod_base = OTHER; note = 2'-O-methyladenosine
  modified_base 86: mod_base = cm
  modified_base 96: mod_base = cm
  modified_base 109: mod_base = OTHER; note = 2' fluoro modified base
  modified_base 111: mod_base = OTHER; note = 2' fluoro modified base
  modified_base 113: mod_base = um
  modified_base 114: mod_base = cm
  modified_base 115: mod_base = um
  modified_base 116: mod_base = OTHER; note = Phosphorothioate (PS) linkage
  modified_base 116: mod_base = cm
  modified_base 117: mod_base = OTHER; note = Phosphorothioate (PS) linkage
  modified_base 117: mod_base = OTHER; note = 2'-O-methyladenosine
  modified_base 118: mod_base = OTHER; note = Phosphorothioate (PS) linkage
  modified_base 118: mod_base = gm
  source 1..118: mol_type = other RNA

SEQ ID NO: 1048 - RNA, 100 nt, synthetic construct; identical to SEQ ID NO: 505
  source 1..100: mol_type = other RNA

SEQ ID NO: 1049 - RNA, 100 nt, synthetic construct; identical to SEQ ID NO: 505
  modified_base 1: mod_base = um
  modified_base 2: mod_base = OTHER; note = Phosphorothioate (PS) linkage
  modified_base 2: mod_base = um
  modified_base 3: mod_base = OTHER; note = Phosphorothioate (PS) linkage
  modified_base 3: mod_base = cm
  modified_base 4: mod_base = OTHER; note = Phosphorothioate (PS) linkage
  modified_base 29: mod_base = gm
  modified_base 30: mod_base = cm
  modified_base 31: mod_base = um
  modified_base 32: mod_base = OTHER; note = 2'-O-methyladenosine
  modified_base 33: mod_base = gm
  modified_base 34: mod_base = OTHER; note = 2'-O-methyladenosine
  modified_base 35: mod_base = OTHER; note = 2'-O-methyladenosine
  modified_base 36: mod_base = OTHER; note = 2'-O-methyladenosine
  modified_base 37: mod_base = um
  modified_base 38: mod_base = OTHER; note = 2'-O-methyladenosine
  modified_base 39: mod_base = gm
  modified_base 40: mod_base = cm
  modified_base 68: mod_base = OTHER; note = 2'-O-methyladenosine
  modified_base 69: mod_base = OTHER; note = 2'-O-methyladenosine
  modified_base 70: mod_base = cm
  modified_base 71: mod_base = um
  modified_base 72: mod_base = um
  modified_base 73: mod_base = gm
  modified_base 74: mod_base = OTHER; note = 2'-O-methyladenosine
  modified_base 75: mod_base = OTHER; note = 2'-O-methyladenosine
  modified_base 76: mod_base = OTHER; note = 2'-O-methyladenosine
  modified_base 77: mod_base = OTHER; note = 2'-O-methyladenosine
  modified_base 78: mod_base = OTHER; note = 2'-O-methyladenosine
  modified_base 79: mod_base = gm
  modified_base 80: mod_base = um
  modified_base 81: mod_base = gm
  modified_base 82: mod_base = gm
  modified_base 83: mod_base = cm
  modified_base 84: mod_base = OTHER; note = 2'-O-methyladenosine
  modified_base 85: mod_base = cm
  modified_base 86: mod_base = cm
  modified_base 87: mod_base = gm
  modified_base 88: mod_base = OTHER; note = 2'-O-methyladenosine
  modified_base 89: mod_base = gm
  modified_base 90: mod_base = um
  modified_base 91: mod_base = cm
  modified_base 92: mod_base = gm
  modified_base 93: mod_base = gm
  modified_base 94: mod_base = um
  modified_base 95: mod_base = gm
  modified_base 96: mod_base = cm
  modified_base 97: mod_base = um
  modified_base 98: mod_base = OTHER; note = Phosphorothioate (PS) linkage
  modified_base 98: mod_base = um
  modified_base 99: mod_base = OTHER; note = Phosphorothioate (PS) linkage
  modified_base 99: mod_base = um
  modified_base 100: mod_base = OTHER; note = Phosphorothioate (PS) linkage
  modified_base 100: mod_base = um
  source 1..100: mol_type = other RNA

SEQ ID NO: 1050 - RNA, 86 nt, synthetic construct
  source 1..86: mol_type = other RNA
aaggctgtgctgaccatcgagtttttgtactctgaaaagaagctacaaagataaggcttcatgccgaaatcaactcgtcgatggtc

SEQ ID NO: 1051 - RNA, 86 nt, synthetic construct; identical to SEQ ID NO: 1050
  modified_base 1: mod_base = OTHER; note = 2'-O-methyladenosine
  modified_base 2: mod_base = OTHER; note = Phosphorothioate (PS) linkage
  modified_base 2: mod_base = OTHER; note = 2'-O-methyladenosine
  modified_base 3: mod_base = OTHER; note = Phosphorothioate (PS) linkage
  modified_base 3: mod_base = gm
  modified_base 4: mod_base = OTHER; note = Phosphorothioate (PS) linkage
  modified_base 25: mod_base = um
  modified_base 26: mod_base = um
  modified_base 27: mod_base = gm
  modified_base 28: mod_base = um
  modified_base 29: mod_base = OTHER; note = 2'-O-methyladenosine
  modified_base 32: mod_base = cm
  modified_base 33: mod_base = um
  modified_base 34: mod_base = gm
  modified_base 35: mod_base = OTHER; note = 2'-O-methyladenosine
  modified_base 36: mod_base = OTHER; note = 2'-O-methyladenosine
  modified_base 37: mod_base = OTHER; note = 2'-O-methyladenosine
  modified_base 38: mod_base = OTHER; note = 2'-O-methyladenosine
  modified_base 39: mod_base = gm
  modified_base 40: mod_base = OTHER; note = 2'-O-methyladenosine
  modified_base 41: mod_base = OTHER; note = 2'-O-methyladenosine
  modified_base 49: mod_base = OTHER; note = 2'-O-methyladenosine
  modified_base 57: mod_base = cm
  modified_base 58: mod_base = um
  modified_base 60: mod_base = cm
  modified_base 70: mod_base = um
  modified_base 72: mod_base = OTHER; note = 2'-O-methyladenosine
  modified_base 73: mod_base = OTHER; note = 2'-O-methyladenosine
  modified_base 84: mod_base = OTHER; note = Phosphorothioate (PS) linkage
  modified_base 84: mod_base = gm
  modified_base 85: mod_base = OTHER; note = Phosphorothioate (PS) linkage
  modified_base 85: mod_base = um
  modified_base 86: mod_base = OTHER; note = Phosphorothioate (PS) linkage
  modified_base 86: mod_base = cm
  source 1..86: mol_type = other RNA

SEQ ID NO: 1052 - RNA, 89 nt, synthetic construct
  source 1..89: mol_type = other RNA
cataaggctgtgctgaccatcgagtttttgtactccgaaaggaagctacaaagataaggcttcatgccgaaatcatctcgtcgatggtc

SEQ ID NO: 1053 - RNA, 89 nt, synthetic construct; identical to SEQ ID NO: 1052
  modified_base 1: mod_base = cm
  modified_base 2: mod_base = OTHER; note = Phosphorothioate (PS) linkage
  modified_base 2: mod_base = OTHER; note = 2'-O-methyladenosine
  modified_base 3: mod_base = OTHER; note = Phosphorothioate (PS) linkage
  modified_base 3: mod_base = um
  modified_base 4: mod_base = OTHER; note = Phosphorothioate (PS) linkage
  modified_base 28: mod_base = um
  modified_base 29: mod_base = um
  modified_base 30: mod_base = gm
  modified_base 31: mod_base = um
  modified_base 32: mod_base = OTHER; note = 2'-O-methyladenosine
  modified_base 35: mod_base = cm
  modified_base 36: mod_base = cm
  modified_base 37: mod_base = gm
  modified_base 38: mod_base = OTHER; note = 2'-O-methyladenosine
  modified_base 39: mod_base = OTHER; note = 2'-O-methyladenosine
  modified_base 40: mod_base = OTHER; note = 2'-O-methyladenosine
  modified_base 41: mod_base = gm
  modified_base 42: mod_base = gm
  modified_base 43: mod_base = OTHER; note = 2'-O-methyladenosine
  modified_base 44: mod_base = OTHER; note = 2'-O-methyladenosine
  modified_base 52: mod_base = OTHER; note = 2'-O-methyladenosine
  modified_base 60: mod_base = cm
  modified_base 61: mod_base = um
  modified_base 63: mod_base = cm
  modified_base 73: mod_base = um
  modified_base 75: mod_base = OTHER; note = 2'-O-methyladenosine
  modified_base 76: mod_base = um
  modified_base 84: mod_base = OTHER; note = 2' fluoro modified base
  modified_base 86: mod_base = gm
  modified_base 87: mod_base = OTHER; note = Phosphorothioate (PS) linkage
  modified_base 87: mod_base = gm
  modified_base 88: mod_base = OTHER; note = Phosphorothioate (PS) linkage
  modified_base 88: mod_base = um
  modified_base 89: mod_base = OTHER; note = Phosphorothioate (PS) linkage
  modified_base 89: mod_base = cm
  source 1..89: mol_type = other RNA

SEQ ID NO: 1054 - protein, 9 aa, synthetic construct
PAAKKKKLD

SEQ ID NO: 1055 - protein, 20 aa, synthetic construct
PKRPRDRHDGELGGRKRARG

SEQ ID NO: 1056 - protein, 25 aa, synthetic construct
GGGGSGGGGSGGGGSGGGGSGGGGS

SEQ ID NO: 1057 - protein, 30 aa, synthetic construct
GGGGSGGGGSGGGGSGGGGSGGGGSGGGGS

SEQ ID NO: 1058 - protein, 25 aa, synthetic construct
EAAAKEAAAKEAAAKEAAAKEAAAK

SEQ ID NO: 1059 - protein, 35 aa, synthetic construct
EAAAKEAAAKEAAAKEAAAKEAAAKEAAAKEAAAK

SEQ ID NO: 1060 - protein, 50 aa, synthetic construct
GSAEAAAKEAAAKEAAAKEAAAKALEAEAAAKEAAAKEAAAKEAAAKASG

SEQ ID NO: 1061 - protein, 12 aa, synthetic construct
AEAAAKEAAAKA

SEQ ID NO: 1062 - protein, 36 aa, synthetic construct
AEAAAKEAAAKAAEAAAKEAAAKAAEAAAKEAAAKA

SEQ ID NO: 1063 - protein, 30 aa, synthetic construct
GGGGSEAAAKEAAAKEAAAKEAAAKGGGGS

SEQ ID NO: 1064 - protein, 35 aa, synthetic construct
GGGGSEAAAKEAAAKEAAAKEAAAKEAAAKGGGGS

SEQ ID NO: 1065 - protein, 47 aa, synthetic construct
GGGGSEAAAKEAAAKEAAAKGGSGGSGEAAAKEAAAKEAAAKGGGGS

SEQ ID NO: 1066 - protein, 12 aa, synthetic construct
GSAGSAAGSGEF

SEQ ID NO: 1067 - protein, 24 aa, synthetic construct
GSAGSAAGSGEFEGSGSAASGASG

SEQ ID NO: 1068 - protein, 5 aa, synthetic construct
PAPAP

SEQ ID NO: 1069 - protein, 15 aa, synthetic construct
PAPAPPAPAPPAPAP

SEQ ID NO: 1070 - protein, 25 aa, synthetic construct
PAPAPPAPAPPAPAPPAPAPPAPAP

SEQ ID NO: 1071 - protein, 30 aa, synthetic construct
PAPAPPAPAPPAPAPPAPAPPAPAPPAPAP

SEQ ID NO: 1072 - protein, 35 aa, synthetic construct
PAPAPPAPAPPAPAPPAPAPPAPAPPAPAPPAPAP

SEQ ID NO: 1073 - protein, 58 aa, synthetic construct
SGGGGSAEAAAKEAAAKEAAAKEAAAKALEAEAAAKEAAAKEAAAKEAAAKASGGGGS

SEQ ID NO: 1074 - protein, 34 aa, synthetic construct; identical to SEQ ID NO: 7

SEQ ID NO: 1075 - RNA, 47 nt, synthetic construct; identical to SEQ ID NO: 193
  source 1..47: mol_type = other RNA

SEQ ID NO: 1076 - RNA, 250 nt, synthetic construct
  source 1..250: mol_type = other RNA
gtgctggtctgtgtgctggcccatcactttggcaaagaattcaccccaccagtgcaggctgcctatcagaaagtggtggctggtgtggctaatgccctggcccacaagtatcactaagctcgctttcttgctgtccaatttctattaaaggttcctttgttccctaagtccaactactaaactgggggatattatgaagggccttgagcatctggattctgcctaataaaaaacatttattttcattgca

SEQ ID NO: 1077 - RNA, 110 nt, synthetic construct; identical to SEQ ID NO: 188
  source 1..110: mol_type = other RNA

SEQ ID NO: 1078 - RNA, 114 nt, synthetic construct
  source 1..114: mol_type = other RNA
gcggccgcttaattaagctgccttctgcggggcttgccttctggccatgcccttcttctctcccttgcacctgtacctcttggtctttgaataaagcctgagtaggaagtctag

SEQ ID NO: 1079 - RNA, 250 nt, synthetic construct; identical to SEQ ID NO: 1076
  source 1..250: mol_type = other RNA

SEQ ID NO: 1080 - RNA, 278 nt, synthetic construct
  source 1..278: mol_type = other RNA
ctggtactgcatgcacgcaatgctagctgcccctttcccgtcctgggtaccccgagtctcccccgacctcgggtcccaggtatgctcccacctccacctgccccactcaccacctctgctagttccagacacctcccaagcacgcagcaatgcagctcaaaacgcttagcctagccacacccccacgggaaacagcagtgattaacctttagcaataaacgaaagtttaactaagctatactaaccccagggttggtcaatttcgtgccagccacacc

SEQ ID NO: 1081 - RNA, 52 nt, synthetic construct
  source 1..52: mol_type = other RNA
agacagagacctcgcaggccccgagaactgtcgcccttccacgatggccaaa

SEQ ID NO: 1082 - RNA, 52 nt, synthetic construct
  source 1..52: mol_type = other RNA
agacagagacctcgcaggccccgagaactgtcgcccttccaccatggccaaa

SEQ ID NO: 1083 - RNA, 52 nt, synthetic construct
  source 1..52: mol_type = other RNA
agacagagacctcgcaggccccgagaactgtcgccctgccaccatggccaaa

SEQ ID NO: 1084 - RNA, 49 nt, synthetic construct
  source 1..49: mol_type = other RNA
agacagagacctcgcaggccccgagaactgtcgcccttccacgatgaaa

SEQ ID NO: 1085 - RNA, 6402 nt, synthetic construct
  source 1..6402: mol_type = other RNA
atgaaacggacagccgacggaagcgagttcgagtcaccaaagaagaagcggaaagtcgacaagaagtacagcatcggcctggacatcggcaccaactctgtgggctgggccgtgatcaccgacgagtacaaggtgcccagcaagaaattcaaggtgctgggcaacaccgaccggcacagcatcaagaagaacctgatcggagccctgctgttcgacagcggcgaaacagccgaggccacccggctgaagagaaccgccagaagaagatacaccagacggaagaaccggatctgctatctgcaagagatcttcagcaacgagatggccaaggtggacgacagcttcttccacagactggaagagtccttcctggtggaagaggataagaagcacgagcggcaccccatcttcggcaacatcgtggacgaggtggcctaccacgagaagtaccccaccatctaccacctgagaaagaaactggtggacagcaccgacaaggccgacctgcggctgatctatctggccctggcccacatgatcaagttccggggccacttcctgatcgagggcgacctgaaccccgacaacagcgacgtggacaagctgttcatccagctggtgcagacctacaaccagctgttcgaggaaaaccccatcaacgccagcggcgtggacgccaaggccatcctgtctgccagactgagcaagagcagaaagctggaaaatctgatcgcccagctgcccggcgagaagaagaatggcctgttcggaaacctgattgccctgagcctgggcctgacccccaacttcaagagcaacttcgacctggccgaggatgccaaactgcagctgagcaaggacacctacgacgacgacctggacaacctgctggcccagatcggcgaccagtacgccgacctgtttctggccgccaagaacctgtccgacgccatcctgctgagcgacatcctgagagtgaacaccgagatcaccaaggcccccctgagcgcctctatgatcaagagatacgacgagcaccaccaggacctgaccctgctgaaagctctcgtgcggcagcagctgcctgagaagtacaaagagattttcttcgaccagagcaagaacggctacgccggctacattgacggcggagccagccaggaagagttctacaagttcatcaagcccatcctggaaaagatggacggcaccgaggaactgctcgtgaagctgaagagagaggacctgctgcggaagcagcggaccttcgacaacggcagcatcccccaccagatccacctgggagagctgcacgccattctgcggcggcaggaagatttttacccattcctgaaggacaaccgggaaaagatcgagaagatcctgaccttccgcatcccctactacgtgggccctctggccaggggaaacagcagattcgcctggatgaccagaaagagcgaggaaaccatcaccccctggaacttcgaggaagtggtggacaagggcgcttccgcccagagcttcatcgagcggatgaccaacttcgataagaacctgcccaacgagaaggtgctgcccaagcacagcctgctgtacgagtacttcaccgtgtataacgagctgaccaaagtgaaatacgtgaccgagggaatgagaaagcccgccttcctgagcggcgagcagaaaaaggccatcgtggacctgctgttcaagaccaaccggaaagtgaccgtgaagcagctgaaagaggactacttcaagaaaatcgagtgcttcgactccgtggaaatctccggcgtggaagatcggttcaacgcctccctgggcacataccacgatctgctgaaaattatcaaggacaaggacttcctggacaatgaggaaaacgaggacattctggaagatatcgtgctgaccctgacactgtttgaggacagagagatgatcgaggaacggctgaaaacctatgcccacctgttcgacgacaaagtgatgaagcagctgaagcggcggagatacaccggctggggcaggctgagccggaagctgatcaacggcatccgggacaagcagtccggcaagacaatcctggatttcctgaagtccgacggcttcgccaacagaaacttcatgcagctgatccacgacgacagcctgacctttaaagaggacatccagaaagcccaggtgtccggccagggcgatagcctgcacgagcacattgccaatctggccggcagccccgccattaagaagggcatcctgcagacagtgaaggtggtggacgagctcgtgaaagtgatgggccggcacaagcccgagaacatcgtgatcgaaatggccagagagaaccagaccacccagaagggacagaagaacagccgcgagagaatgaagcggatcgaagagggcatcaaagagctgggcagccagatcctgaaagaacaccccgtggaaaacacccagctgcagaacgagaagctgtacctgtactacctgcagaatgggcgggatatgtacgtggaccaggaactggacatcaaccggctgtccgactacgatgtggacgctatcgtgcctcagagctttctgaaggacgactccatcgacaacaaggtgctgaccagaagcgacaagaaccggggcaagagcgacaacgtgccctccgaagaggtcgtgaagaagatgaagaactactggcggcagctgctgaacgccaagctgattacccagagaaagttcgacaatctgaccaaggccgagagaggcggcctgagcgaactggataaggccggcttcatcaagagacagctggtggaaacccggcagatcacaaagcacgtggcacagatcctggactcccggatgaacactaagtacgacgagaatgacaagctgatccgggaagtgaaagtgatcaccctgaagtccaagctggtgtccgatttccggaaggatttccagttttacaaagtgcgcgagatcaacaactaccaccacgcccacgacgcctacctgaacgccgtcgtgggaaccgccctgatcaaaaagtaccctaagctggaaagcgagttcgtgtacggcgactacaaggtgtacgacgtgcggaagatgatcgccaagagcgagcaggaaatcggcaaggctaccgccaagtacttcttctacagcaacatcatgaactttttcaagaccgagattaccctggccaacggcgagatccggaagcggcctctgatcgagacaaacggcgaaaccggggagatcgtgtgggataagggccgggattttgccaccgtgcggaaagtgctgagcatgccccaagtgaatatcgtgaaaaagaccgaggtgcagacaggcggcttcagcaaagagtctatcctgcccaagaggaacagcgataagctgatcgccagaaagaaggactgggaccctaagaagtacggcggcttcgacagccccaccgtggcctattctgtgctggtggtggccaaagtggaaaagggcaagtccaagaaactgaagagtgtgaaagagctgctggggatcaccatcatggaaagaagcagcttcgagaagaatcccatcgactttctggaagccaagggctacaaagaagtgaaaaaggacctgatcatcaagctgcctaagtactccctgttcgagctggaaaacggccggaagagaatgctggcctctgccggcgaactgcagaagggaaacgaactggccctgccctccaaatatgtgaacttcctgtacctggccagccactatgagaagctgaagggctcccccgaggataatgagcagaaacagctgtttgtggaacagcacaagcactacctggacgagatcatcgagcagatcagcgagttctccaagagagtgatcctggccgacgctaatctggacaaagtgctgtccgcctacaacaagcaccgggataagcccatcagagagcaggccgagaatatcatccacctgtttaccctgaccaatctgggagcccctgccgccttcaagtactttgacaccaccatcgaccggaagaggtacaccagcaccaaagaggtgctggacgccaccctgatccaccagagcatcaccggcctgtacgagacacggatcgacctgtctcagctgggaggtgactccggcggaagctctggtggcagcaagcggaccgccgacggctctgaattcgagagccctaagaagaaaagaaaggtgagcggaggctctagcggcggaagcaccctgaacattgaagacgagtatagactgcatgaaacaagcaaggaacccgacgtgtccctgggctccacctggctgtccgactttccccaggcctgggccgagacaggaggaatgggcctggccgtgcggcaggcacccctgatcatccctctgaaggccacctctacacccgtgagcatcaagcagtaccctatgtctcaggaggccagactgggcatcaagcctcacatccagaggctgctggaccagggcatcctggtgccatgccagagcccctggaacacaccactgctgcccgtgaagaagccaggcaccaatgactatagacccgtgcaggatctgagagaggtgaacaagagggtggaggatatccaccccaccgtgcccaacccttacaatctgctgtccggcctgcccccttctcaccagtggtatacagtgctggacctgaaggatgccttcttttgtctgagactgcaccctaccagccagccactgttcgcctttgagtggagggaccctgagatgggcatctctggccagctgacctggacacgcctgcctcagggcttcaagaatagcccaacactgtttaacgaggccctgcaccgcgacctggcagatttccggatccagcacccagatctgatcctgctgcagtacgtggacgatctgctgctggccgccaccagcgagctggattgccagcagggaacacgcgccctgctgcagaccctgggaaacctgggatatagggcatccgccaagaaggcccagatctgtcagaagcaggtgaagtacctgggctatctgctgaaggagggccagagatggctgacagaggccaggaaggagacagtgatgggccagccaacacccaagaccccaagacagctgagggagttcctgggcaaagcaggattttgcaggctgttcatcccaggattcgcagagatggcagcacctctgtacccactgaccaagccgggcaccctgtttaattggggccctgaccagcagaaggcctatcaggagatcaagcaggccctgctgacagcaccagccctgggcctgccagacctgaccaagcctttcgagctgtttgtggatgagaagcagggctacgccaagggcgtgctgacccagaagctgggaccatggagacggcccgtggcctatctgtccaagaagctggacccagtggcagcaggatggccaccatgcctgaggatggtggcagcaatcgccgtgctgacaaaggatgccggcaagctgaccatgggacagccactggtcatcctggcaccacacgcagtggaggccctggtgaagcagcctccagatcgctggctgtctaacgcccggatgacacactaccaggccctgctgctggacaccgatcgcgtgcagtttggccctgtggtggccctgaatccagccaccctgctgcctctgccagaggagggcctgcagcacaactgtctggacatcctggcagaggcacacggaacaaggccagacctgaccgatcagcccctgcctgacgccgatcacacatggtataccgatggaagctccctgctgcaggagggccagaggaaggcaggagcagcagtgaccacagagacagaagtgatctgggccaaggccctgccagcaggcacatccgcccagcgggccgagctgatcgccctgacccaggccctgaagatggccgagggcaagaagctgaacgtgtacacagactccagatatgccttcgccaccgcacacatccacggagagatctacaggcgccggggctggctgacctctgagggcaaggagatcaagaacaaggatgagatcctggccctgctgaaggccctgtttctgcccaagcggctgagcatcatccactgtcctggacaccagaagggacactccgccgaggcaaggggcaatcggatggccgaccaggccgccagaaaggctgctattactgaaactcccgacacttccactctgctgattgaaaactcctccccttctggcggctcaaaaagaaccgccgacggcagcgaattcgagtctcccaagaagaagaggaaagtcggctctggccctgccgctaagagagtgaagctggactaatagtga

SEQ ID NO: 1086 - RNA, 6402 nt, synthetic construct
  source 1..6402: mol_type = other RNA
atgaagcgcacggcagacgggtccgagttcgagagccccaagaagaagcggaaggtagacaagaagtattctatcgggttggacatcggtaccaactcggtgggatgggcggtgatcactgatgagtacaaggtgccgtccaagaaattcaaggtgctgggtaacaccgatcgacatagtatcaagaagaacttgatcggcgccttgctgttcgattcaggcgagacggccgaggccactcgcctgaagcgaacagcaaggcgccgatacacgcggcggaagaatcggatatgctacctccaggagatattctcgaacgagatggccaaggtggacgactcgttcttccaccgcctcgaggagagctttctcgtcgaggaggacaagaagcacgagcgccaccccatcttcgggaatatcgtcgacgaggtggcatatcacgagaagtatccgactatctaccaccttcggaagaagctggtggatagtacggataaggcggacctgcgccttatctatttggcgttggcccatatgatcaagtttcgaggacacttcctgatcgagggtgatctcaatccagataatagcgatgtggacaagctgttcatacagcttgtccagacgtacaaccagctgtttgaggagaaccctatcaacgcctcgggtgtggacgccaaggccatacttagtgcccggctgtccaagagccgcaagcttgagaatctgatcgcccagctgccgggtgagaagaagaacggcctgttcggcaatctgatagccctctccctcggccttacgccaaatttcaagtcgaacttcgacctcgctgaggatgccaagcttcagttgagcaaggacacctatgatgatgatcttgacaacctcctcgctcagatcggcgaccagtacgccgatctcttcctggcggcgaagaatctgagcgatgcaattctcctgagtgacattctccgtgtgaacacggagatcaccaaggctcctctgtccgcgtccatgatcaagcggtatgatgagcaccaccaggacttgaccctcctgaaggcgctcgtccgtcagcagttgccggagaagtacaaggagatattcttcgaccagtcgaagaatggctacgccggctacattgacggaggagcgtctcaggaggagttctacaagttcatcaagccgatccttgagaagatggacgggacagaggagctcttggtgaagctgaagcgggaggacctgttgcgaaagcagcggactttcgacaacgggtccatcccgcatcagattcacttaggagagttgcacgcgattcttcgccgccaggaagacttctaccccttcctcaaagacaacagggagaagatcgagaagatcctcaccttccggatcccgtattacgtgggtcccctggcccgggggaactcacgttttgcgtggatgacccggaagagtgaggagacgatcactccctggaactttgaggaagtggtggacaagggtgcttcggcacagtccttcatcgagcggatgacaaattttgacaagaatttgccgaacgagaaggtcttgccgaagcactcgctgctttacgagtactttacggtttacaacgagttgacgaaggtcaagtacgtcactgagggaatgcggaagcccgcattcctcagtggcgaacagaagaaggccatcgtcgacttgttgttcaagacgaaccgtaaagtaaccgtgaagcagctgaaggaggactacttcaagaagattgagtgtttcgactcggtggagatttcaggagttgaggaccgctttaatgcctccctcggtacgtatcatgatctcctcaagattatcaaggataaggacttccttgataatgaggagaatgaggatattctcgaggacattgtgctgaccctgacgctgtttgaagatcgggagatgatcgaggaacgcctgaagacctacgcccacctgtttgatgacaaggtcatgaagcagctgaagcggcgtaggtacacaggctggggccgcttgtcccggaagctgatcaacggcatccgggacaagcagtccggcaagaccatcctggactttcttaagtccgatggttttgccaaccggaacttcatgcagctcatccacgacgactccttgaccttcaaggaggatatccagaaggcgcaggtgagcggccagggcgatagcttgcacgagcatatcgccaacctggccggctcacctgcgatcaagaagggtatcctccagacggtcaaggtcgtggatgagctggtgaaggtcatgggtcggcacaagcccgagaatatcgtcatcgagatggctcgcgagaatcagacgacccagaagggtcagaagaattctcgcgagcgcatgaagcgtatcgaggagggcattaaagagctcggttctcagatcctgaaagagcacccagtcgagaacactcagcttcagaacgagaagctctacctctattacttgcagaacgggcgggacatgtacgtggatcaggagctggacatcaaccggctctctgactacgatgtcgatgctatcgtccctcagagctttctgaaggacgatagcatcgacaacaaggtcctgacccgttctgacaagaatagaggtaagagcgacaacgttccgagcgaggaggttgtcaagaagatgaagaattattggcgtcagttgctcaacgcgaagctcatcactcagcggaagttcgacaatttgacgaaggccgagcggggagggctgtcagagctggacaaggccggcttcatcaaacggcagctggtggagacgcgacagattaccaagcatgtggcccagatcttggacagccggatgaacactaagtatgacgagaatgacaagcttattcgggaggtcaaggtcattacccttaagtcgaagctcgtcagcgactttcgcaaggattttcagttttataaagttcgtgagataaacaattatcaccatgcccacgacgcgtacctgaacgccgtcgtgggcacggcgctgataaagaagtacccgaagctggagtccgagttcgtttatggcgattataaggtgtacgacgtgcgcaagatgatcgccaagagcgagcaggagatcggaaaggctacggccaagtacttcttttacagcaacatcatgaacttttttaagactgagatcacccttgcgaatggcgagatccgcaagcggccgttgatcgagacgaacggggagactggggagattgtctgggacaagggacgggactttgcgaccgttcgcaaagtcctgtccatgccccaggtgaacatcgtcaagaagacggaggttcagacggggggcttctccaaggagtccattcttccgaagcgaaacagcgacaagctgatcgctcggaagaaggactgggatcccaagaagtatggcggcttcgactctccgactgtggcctactccgtcttggtggtggccaaggtggagaagggcaagtcgaagaagttgaagtccgtcaaggagcttcttgggatcaccatcatggagaggtcctcctttgagaagaatcctattgacttccttgaagccaagggctacaaggaagtcaagaaggatctgatcatcaagctccccaagtactccctgttcgagctcgagaacggccgcaagcggatgctcgccagcgctggcgagcttcagaagggtaatgagcttgccctcccgagtaagtatgtcaacttcttgtacttggcgtcccactacgagaagttgaagggttctcccgaagacaacgagcagaagcagctgttcgttgagcagcacaagcattatctggatgagatcatcgagcagatcagcgagttctcgaagcgggtcatattggccgacgccaatctggataaggtgctgtccgcctacaacaagcaccgagataagccaatacgtgagcaggcggagaacatcatccacctgttcacgttgactaatctcggtgctcccgccgcgttcaagtacttcgatactacgatcgatcggaagcgttacaccagcaccaaggaggtcttggacgccaccttgattcatcagtcgatcacgggcctgtacgaaacacggatcgatttgtcccagcttggcggggacagcgggggttccagcggcggcagcaagcggaccgcggacgggtccgagttcgagtcgcccaagaagaagcggaaggtttctggaggctcgtcaggcggctcgaccttgaacatcgaggacgagtaccgcctgcacgaaacatccaaggagcctgacgtttctcttgggtcgacttggctctcggactttccgcaggcttgggcggaaacaggggggatgggcctggcggtgagacaggcccccctgatcataccgctgaaggccacatccaccccggtgtccatcaagcagtatcccatgagccaggaggcgcggctggggatcaagccccacatccagcgcctcctggatcaggggatactggtcccttgccagtccccctggaacaccccgctgctccccgtcaagaagcctgggacaaacgattaccggcccgttcaggatttgagggaggtgaacaagcgggtggaggacatccacccgactgttcccaatccctacaatctcctgagcgggctgccgccctcccaccagtggtacacggtgttggacctgaaggatgcttttttctgccttcggcttcatcccacatctcagcctctcttcgctttcgagtggagagatcctgagatggggatctcggggcagttgacttggacccgtctgccgcagggcttcaagaacagtccaactttattcaacgaggctttgcaccgggacctggccgacttccgcattcagcatccggacttgatcttgctgcagtacgtggacgacttgctgctcgccgctacgagcgagctggactgtcagcagggtactcgggccttgttgcagacgctcggtaacctcggttaccgagcgtctgcaaagaaggcccagatctgccagaagcaggtcaagtatctggggtatctgttaaaggaggggcagcggtggctcaccgaagcccggaaggagacggtaatgggccagcctaccccaaagaccccgcggcagctgcgggagtttttggggaaggctggcttttgccgtctcttcattccgggcttcgctgagatggccgcgcccctctatccgctaacaaagcctgggacgctgtttaactggggccccgaccagcagaaggcgtaccaggagatcaagcaggcgctgctcacggccccagctctgggtctgcccgacttgacgaagcccttcgagcttttcgtggacgagaagcagggctacgccaagggggtgctgacccagaagctgggaccttggcggcgcccggtggcctatctcagcaagaagctggatccggtcgccgcggggtggccaccatgcctgcgcatggtggccgccatcgcggtgctgaccaaggatgccggcaagctgacgatgggccagcccttggtcatcctggcgcctcatgcggtcgaggccctagttaagcagccacccgatcggtggttgagcaacgcgcggatgacccattatcaggcgctgttgctcgacaccgatcgggtgcagttcggtccggtggtcgccctgaacccggccactctgctgcccctcccggaggaggggctgcagcacaactgtctggatatcttggcggaggcgcacggcacgcggcctgatctgactgatcagccgctgccggacgccgaccacacatggtacacagacggcagctccctcctccaggaggggcagcggaaggccggggcagcggtgaccaccgaaacagaagtgatctgggcgaaagctctgcccgctgggacctcggcccagcgggcagagcttatcgccctgacccaggctttgaagatggcggagggcaagaagctgaacgtgtacacggactcccggtacgcgttcgctactgcccacatccacggcgagatctatcgtcgccgtggatggctgacttcggaaggaaaagagatcaagaacaaggacgagatcctcgccttgttgaaggctcttttccttccgaagcggctgtccatcatccattgccccgggcatcagaagggccactctgctgaggcccggggcaatcggatggcggaccaggccgccaggaaggcggccataacagaaacaccagatacgagtaccctgctgatagagaacagctcgccgagcggcggcagcaagcgtaccgcggacggcagcgagttcgagtccccgaagaagaagcggaaggtcggctcaggtcccgctgcaaagcgagtgaagttggactaatagtga

SEQ ID NO: 1087 - RNA, 6402 nt, synthetic construct
  source 1..6402: mol_type = other RNA
atgaagcgcacggcagacgggtccgagttcgagagccccaagaagaagcggaaggtagacaagaagtattctatcgggttggacatcggtaccaactcggtgggctgggcggtgatcactgatgagtacaaggtgccgtccaagaaattcaaggtgctgggtaacaccgatcgacatagtatcaagaagaacttgatcggggctctcctcttcgatagtggggagacagccgaggccactcggctgaagcggacagctcgccggcgctacacccgacgcaagaatcggatttgctatctccaggagatcttctccaacgagatggcaaaggtggacgactcgttcttccaccgcctcgaggagagctttctcgtcgaggaggacaagaagcacgagcgccaccccatattcggaaatatcgtggatgaggtcgcctatcacgagaagtaccccacgatttatcatctgcgcaagaagctggtggactcaaccgacaaggccgacttgcggttgatctacctggctcttgcgcacatgataaagtttcgggggcacttcttgattgaaggcgacctcaatcccgataattccgatgtggacaagctgtttatacagctggtgcagacctacaaccagctgtttgaagagaatccgattaatgcgtcgggtgtggacgccaaggcgatcctgtccgcccggctgtccaagagccgcaagcttgagaatctgatcgcccagctgccgggtgagaagaagaacggcctgttcggcaatctgatagccctctccctcggccttacgccaaatttcaagtcgaacttcgacctcgctgaggatgccaagcttcagttgagcaaggacacctatgatgatgatcttgacaacctcctcgctcagatcggcgaccagtacgccgatctcttcctggcggcgaagaatctgagcgatgcaattctcctgagtgacattctgagggtgaatactgaaattacgaaggctccgctgtctgccagcatgatcaagcgctacgatgagcatcaccaggacctgacgctcctcaaggctctcgtccgtcagcagctgccggagaagtacaaggagatcttcttcgaccagtcgaagaacggatacgccgggtacatcgacggcggcgcttcccaggaggagttttataagtttataaagcccatcctggagaagatggacgggaccgaggagctcctggtgaagctcaagcgcgaggatctgctgcgcaagcagcggaccttcgataatggcagtattccccatcagattcacttaggagagttgcacgcgattcttcgccgccaggaagacttctaccccttcctcaaagacaacagggagaagatcgagaagatcctcaccttccggatcccgtattacgtgggtcccctggcccgggggaactcacgttttgcgtggatgacccggaagagtgaggagacgatcactccctggaactttgaggaagtggtggacaaaggggcatccgctcagtccttcattgagcggatgaccaactttgacaagaacctccccaacgagaaggtgcttcccaagcattccctcctgtacgagtacttcaccgtgtacaacgagctgacaaaggtgaagtacgtgacggagggaatgcggaagcccgccttcttgtctggggagcagaagaaggccatcgtcgacctcctgttcaagacgaacaggaaggtgacggtgaagcagttgaaggaggactacttcaagaagattgagtgtttcgacagcgtggagatttcaggagttgaggaccggttcaatgcctccctcggtacgtatcatgatctcctcaagattatcaaggataaggacttccttgataatgaggagaatgaggatattctcgaggacattgtgctgaccctgacgctgtttgaggatcgggagatgatcgaggaacgcctgaagacctacgcccacctgtttgatgacaaggtcatgaagcagctgaagcggcgtaggtacacaggctggggccgcttgtcccggaagctgatcaacggcatccgggacaagcagtccggcaagaccatcctggacttcctgaagtccgatggttttgccaaccggaacttcatgcagctcatccacgacgactccttgaccttcaaggaggatatccagaaggcgcaggtgagcggccagggcgatagcttgcacgagcatatcgccaacctggccggctcacctgcgatcaagaagggtatcctccagacggtcaaggtcgtggatgagctggtgaaggtcatgggtcggcacaagcccgagaatatcgtcatcgagatggctcgcgagaatcagacgacccagaagggtcagaagaattctcgcgagcgcatgaagcgtatcgaggagggcattaaggagctcggttctcagatcctgaaagagcaccctgtcgagaacactcagcttcagaacgagaagctctacctctattacttgcagaacgggcgggacatgtacgtggatcaggagctggacatcaaccggctctctgactacgatgtcgatgctatcgtccctcagagctttctgaaggacgatagcatcgacaacaaggtcctgacccgttctgacaagaatagaggtaagagcgacaacgttccgagcgaggaggttgtcaagaagatgaagaattattggcgtcagttgctcaacgcgaagctcatcactcagcggaagttcgacaatttgacgaaggccgagcggggagggctgtcagagctggacaaggccggcttcatcaaacggcagctggtggagacgcgacagattaccaagcatgtggcccagatcttggacagccggatgaacaccaagtacgacgagaatgacaagcttattcgggaggtcaaggtcattacccttaagagcaagctcgtcagcgactttcgcaaggattttcagttttataaagttcgtgagataaacaattatcaccatgcccacgacgcgtacctgaacgccgtcgtgggcacggcgctgataaagaagtacccgaagctggagtccgagttcgtttatggcgattataaggtgtacgacgtgcgcaagatgatcgccaagagcgagcaggagatcggaaaggctacggccaagtacttcttttacagcaacatcatgaacttttttaagactgagatcacccttgcgaatggcgagatccgcaagcggccgttgatcgagacgaacggggagactggggagattgtctgggacaagggacgggactttgcgaccgttcgcaaagtcctgtccatgccccaggtgaacatcgtcaagaagacggaggttcagacggggggcttctccaaggagtccattcttccgaagcgaaacagcgacaagctgatcgctcggaagaaggactgggatcccaagaagtatggcggcttcgactctccgactgtggcctactccgtcttggtggtggccaaggtggagaagggcaagtcgaagaagttgaagtccgtcaaggagcttcttgggatcaccatcatggagaggtcctcctttgagaagaatcctattgacttccttgaagccaagggctacaaggaagtcaagaaggatctgatcatcaagctccccaagtactccctgttcgagctcgagaacggccgcaagcggatgctcgccagcgctggcgagctgcagaagggtaatgagcttgccctcccgagtaagtatgtcaatttcttgtacttggcttcccactatgagaagctgaaggggagccccgaggacaacgagcagaagcagctgttcgttgagcagcacaagcactacctcgatgagatcatcgagcagattagtgagttcagtaagcgggtgatcttggccgatgctaacctggataaggtcctgagtgcttacaataagcaccgggacaagcctatccgggagcaggccgagaacatcattcacctgtttacactcactaatctgggtgctcctgctgctttcaagtacttcgatactacgatcgatcggaagcgttacaccagcaccaaggaggtcttggacgccaccttgattcatcagtcgatcacgggcctgtacgaaacacggatcgatttgtcccagcttggcggggacagcgggggttccagcgggggcagcaagcgcaccgcggacgggtccgagttcgagtctcccaagaagaagcggaaggtttctggaggctcgtcaggcggctcgaccttgaacatcgaggacgagtaccgcctgcacgaaacatccaaggagcctgacgtttctcttgggagcacttggctctcggactttccgcaggcttgggcggaaacaggggggatgggcctggcggtgagacaggcccccctgatcataccgctgaaggccacatccaccccggtgtccatcaagcagtatcccatgagccaggaggcgcggctggggatcaagccccacatccagcgcctcctggatcaggggatactggtgccttgccagtccccctggaacaccccgctgctccccgtcaagaagcctgggacaaacgattaccggcccgttcaggatttgagggaggtgaacaagcgggtggaggacatccacccgactgttcccaatccctacaatctcctgagcgggctgccgcccagccaccagtggtacacggtgttggacctgaaggatgcttttttctgccttcggcttcatcccacatctcagcctctcttcgctttcgagtggagagatcctgagatggggatctcggggcagttgacttggacccgtctgccgcagggcttcaagaacagtccaactttattcaacgaggctttgcaccgggacctggccgacttccgcattcagcatccggacttgatcttgctgcagtacgtggacgacctcttgctggccgccactagcgagctggactgtcagcagggtactcgggccttgttgcagacgctcggtaacctcggttaccgagcgtctgcaaagaaggcccagatctgccagaagcaggtcaagtatctggggtatctgctgaaggaggggcagcggtggctcaccgaagcccggaaggagacggtaatgggccagcctaccccaaagaccccgcggcagctgcgggagtttttggggaaggctggcttttgccgtctcttcattccgggcttcgctgagatggccgcgcccctctatcccctcaccaagcctgggacgctgtttaactggggccccgaccagcagaaggcgtaccaggagatcaagcaggccctgctcacggccccagctctgggtctgcccgacttgacgaagcccttcgagcttttcgtggacgagaagcagggctacgccaagggggtgctgacccagaagctgggaccgtggcggcggcctgtggcctatctcagcaagaagctggatccggtcgccgcggggtggccaccatgcctgcgcatggtggccgccatcgcggtgctgaccaaggatgccggcaagctgacgatgggccagcccttggtcatcctggcgcctcatgcggtcgaggccctagttaagcagccacccgatcggtggttgagcaacgcgcggatgacccattatcaggcgctgttgctcgacaccgatcgggtgcagttcggtccggtggtcgccctgaacccggccactctgctgcccctcccggaggaggggctgcagcacaactgtctggatatcctggcggaggcgcacggcacgcggcctgatctgactgatcagccgctgccggacgccgaccacacatggtacacagacggcagctccctcctccaggaggggcagcggaaggccggggcagcggtgaccaccgaaacagaagtgatctgggcgaaggctctgcccgctgggacctcggcccagcgggcagagctgatcgccctgacccaggctctgaagatggctgaggggaagaagctgaacgtgtacacggactcccggtacgcgttcgcaaccgcccacatccacggcgagatctatcgccggcgtgggtggttgacttcggagggcaaggagatcaagaacaaggatgagatccttgccctcctgaaggcgctgttccttccgaagcggctgtccatcatccattgccccgggcaccagaagggccactctgctgaggcccggggcaatcggatggcggaccaggccgctcggaaggcagcgatcacagaaacaccagatacgagtaccctgctgatagagaacagctcgcctagtggcggcagcaagaggaccgcggacggcagcgagttcgagtccccgaagaagaagcggaaggtcggctcaggtcccgctgcaaagcgagtgaagttggactaatagtga

SEQ ID NO: 1088 - RNA, 6402 nt, synthetic construct
  source 1..6402: mol_type = other RNA
atgaagcggaccgcggacgggtctgagttcgagagtcccaagaagaagcgcaaggtggacaagaagtattccatcgggctcgacatcggcaccaactcagtggggtgggcggtcatcacggatgagtacaaggtgcccagcaagaagttcaaggtgctgggcaacacagatcgccactcgatcaagaagaacctgatcggcgccttgctgttcgattcaggcgagacggccgaggccactcgcctgaagcggacagcaaggcgccggtacacccggaggaagaatcgtatctgctacctccaggagatcttcagcaatgagatggccaaggtggacgacagcttcttccacaggctggaggagtccttcctggtggaggaggataagaagcatgagcgccaccccatcttcgggaacatcgtggatgaggtggcgtatcatgagaagtatcctaccatctaccacctgcggaagaagctggtcgactccaccgacaaggccgatctcaggctgatctacctggccctggcacatatgattaagttcagagggcacttcttgatcgagggcgatctgaaccccgacaacagtgatgtggataagctgtttattcagctggtgcagacctacaaccagctgtttgaggagaatcccatcaatgccagcggggtggacgctaaggccatccttagcgcccgcctgtctaagtccaggaagctggagaatctgatagcccagctgcccggggagaagaagaacgggctctttggaaatctcattgctctgagtttggggctgaccccaaacttcaagagcaacttcgacttggcggaggacgccaagttgcagctcagcaaggacacctacgacgacgacttggacaatctgctcgcacagatcggcgaccagtacgccgatctgtttctggctgccaagaatctgagcgacgccatcctgcttagtgacattctgcgggtgaacaccgagatcaccaaggctccactcagcgcctctatgataaagcggtatgacgagcatcaccaggacctgaccctgctcaaggccttggtcaggcagcagctgcctgagaagtacaaggagatcttcttcgaccagtccaagaatgggtacgctgggtatatcgacggcggtgcttctcaggaggagttctacaagttcattaagcccatcctcgagaagatggatggcaccgaggagctcctggtgaagctgaagagggaggacctgttgcggaagcagcggactttcgacaacgggtccatccctcatcagattcacctgggggagctccatgccatcctgcggaggcaggaggatttctatcctttcctgaaggacaatcgggagaagatagagaagatcctgaccttccgcattccctactatgtgggccctctggcccggggcaactcgaggttcgcctggatgaccaggaagtccgaggaaacaatcactccttggaattttgaggaggtcgtggacaagggggcatccgctcagtccttcattgagcggatgaccaactttgacaagaacctccccaacgagaaggtgcttcccaagcattccctgctgtacgagtacttcaccgtgtacaacgagctgacaaaggtgaagtacgtgacagagggaatgcggaagcccgccttcttgtctggggagcagaagaaggccatcgtcgacctcctgttcaagacgaacaggaaggtgacggtgaagcagctcaaggaggattacttcaagaagatcgagtgcttcgactccgttgagatcagcggagtcgaggaccggtttaatgcctccttgggcacctaccacgacctcctcaagattatcaaggacaaggacttcctggacaacgaggagaacgaggatattctcgaggacattgtgctgaccctgacgctgtttgaggatcgggagatgatcgaggagcgcctgaagacctacgcccacctgtttgatgacaaggtcatgaagcagctgaagcggcgtaggtacacaggctggggccgcttgtcccggaagctgatcaacggcatccgggacaagcagtccggcaagaccatcctggacttcctgaagtccgatggttttgccaaccggaacttcatgcagctcatccacgacgattcactgactttcaaggaggatatccagaaggcgcaggtgagcggccagggcgatagcttgcacgagcatatcgccaacctggccggctcacctgcgatcaagaagggtatcctccagacagtgaaggtcgtggatgagctggtgaaggtcatgggtcggcacaagcccgagaatatcgtcatcgagatggcccgggagaaccagaccacccagaagggccagaagaatagtagggagcgcatgaagcgcatcgaggagggcattaaggagctgggctcccagatcctgaaggagcaccccgtcgagaatacccagctgcagaacgagaagctctacctctattacttgcagaacgggcgggacatgtacgtggatcaggagctggacatcaaccggctctctgactacgatgtcgatgctatcgtccctcagagctttctgaaggacgatagcatcgacaacaaggtcctgacccgttctgacaagaatagaggtaagagcgacaacgtgcccagcgaggaggtggtgaagaagatgaagaactactggaggcagctgctgaacgccaagctgatcactcagcggaagttcgacaacctgaccaaggccgagagaggcggcctgagtgagctcgacaaggccggctttatcaagaggcagctggtggaaacacggcagatcactaagcacgtcgctcagattctggacagccggatgaacaccaagtacgacgagaatgataagctcatccgggaggtgaaggtgatcaccctgaaatccaagcttgtgagcgacttccggaaggacttccagttctacaaggtgcgggagattaacaactaccaccatgcccacgacgcgtacctgaacgccgtcgtgggcactgctctgattaagaagtaccccaagctcgagtccgagtttgtgtacggcgattataaggtgtacgacgtgcgcaagatgatcgccaagtcagagcaggagatcggcaaggccaccgctaagtacttcttctacagcaacatcatgaacttcttcaagacggagatcaccctggcgaatggcgagatccgcaagcggccgttgatcgagacgaacggggagactggggagattgtgtgggataagggtcgggatttcgctaccgtgcgcaaggtgctctccatgccccaggtcaacatcgtgaagaagaccgaggtgcagaccgggggcttcagcaaggagagcatcttgcccaagcggaattccgacaagcttatcgcacgcaagaaggactgggaccccaagaagtacggggggttcgacagtcctacggtggcctactccgtgctggtggtggccaaggtcgagaagggcaagagcaagaagctcaagtccgtgaaggagctgctgggcatcaccatcatggagaggtcatcgtttgagaagaatcctattgacttccttgaggccaagggctacaaggaggtcaagaaggatctgatcatcaagctccccaagtactccctgttcgagctcgagaacggccgcaagcggatgctcgccagcgccggggagctgcagaaggggaacgagctggccttgccgtctaagtatgttaatttcctgtacctggcttctcactacgagaagctgaagggaagtcctgaggataacgagcagaagcagctgtttgtggagcagcacaagcactacctggatgagatcatcgagcagatttccgagttctcgaagcgggtgatccttgctgacgctaacctggataaggtcctgagtgcttacaataagcaccgggacaagcctatccgggagcaggcggagaacatcatccatctgttcacgttgaccaacctgggagcccccgccgccttcaagtacttcgataccactatcgatcggaagcggtataccagcaccaaggaggtgctggatgccactctgatccaccagagcatcaccgggctgtatgagactcggatcgatctcagtcagctcggtggtgactctggtggatcttctgggggctccaagcgcactgccgacggcagtgagtttgagagccccaagaagaagcggaaggtgagcgggggctcctcaggggggtcaacgctgaacatcgaggatgagtaccgcctgcatgagacttccaaggagcccgacgtctccctgggcagcacctggctgtcagattttccacaggcctgggctgagacaggcgggatgggcctggccgtgcgccaggcccccttgatcatccccctgaaggccacgtccaccccagtgagtatcaagcagtatcccatgagccaggaggcgcggctggggatcaagccccacatccagcgcctcctggatcaggggatactggtgccgtgtcagagcccgtggaatactcccttgctgcctgtgaagaagcctgggactaacgactacagacccgtccaggatctgcgggaggtgaacaagcgggtggaggacatccaccccaccgtccccaatccatacaacctgcttagcggcctgcccccttcccaccagtggtacacggtgctggacctgaaggacgccttcttctgtctgcggctgcatcccacatctcagcctctcttcgctttcgagtggagagatcctgagatggggatcagcggccagctgacatggacccggttgccgcagggcttcaagaacagccccacgctgttcaatgaggccctgcaccgggacctggcggacttcaggatccagcaccctgacctgattctgctgcagtacgtggacgatctcctgctggcagccaccagcgagctggactgccagcaggggacccgcgcactgctgcagactctggggaatctgggctatcgggccagcgccaagaaggcccagatttgccagaagcaggtgaagtatctggggtatctgctgaaggaggggcagcggtggctgaccgaggcccggaaggagacggtgatgggccagcctaccccaaagacccctcggcagctgagggagtttttggggaaggctggcttttgccgtctcttcattccgggcttcgcagaaatggctgcccctctgtacccgctgaccaagccgggtacgctgtttaactgggggcctgatcagcagaaggcttaccaggagatcaagcaggccctgctgaccgccccagcactgggcctgcctgatctcactaagcctttcgagctttttgtggatgagaagcagggctacgccaagggcgtgctgacccagaagctgggcccttggcggcgccctgtggcttatctgagcaagaagctcgatccggttgccgcgggctggccaccatgcctgcgcatggtggccgcgattgcggtgctgaccaaggacgccgggaagctgaccatgggtcagcccctggtgatcctggcaccgcacgctgtcgaggcacttgtgaagcagccccccgaccggtggctgagcaacgcccggatgacccactaccaggccctgctgctggacaccgacagggtccagtttgggccggtggtggctctgaatccggccacgttgctcccgctgccggaggaggggctgcagcacaactgcctcgacattctggccgaggcccacggcactcggccagacctcactgatcagccactccccgacgccgatcacacctggtacacggacggctccagccttctgcaggagggccagcggaaggctggagccgccgtgaccacagaaacagaggtcatctgggcgaaggctctgcccgctgggaccagcgcccagcgggcagagctgatcgccctgacccaggctctgaagatggctgagggcaagaagctgaacgtgtacacggactcccggtacgcgttcgctactgcccacatccatggtgagatctaccggcgtcgggggtggctgaccagtgagggcaaggagatcaagaacaaggatgagatccttgctctgctgaaggcccttttcctgcccaagcggctgagtatcattcactgccctgggcaccagaagggccattcagcagaggcccgcggcaaccggatggctgatcaggccgccaggaaggcagccatcacagaaacaccagatacttcaaccctgctgatcgagaattcctctccttctgggggctccaagcgcactgccgacggcagtgagtttgagagccccaagaagaagaggaaggtgggaagcgggccggccgctaagcgggtgaagctggattaatagtga

SEQ ID NO: 1089 - RNA, 122 nt, synthetic construct; identical to SEQ ID NO: 37
  modified_base 1: mod_base = um
  modified_base 2: mod_base = OTHER; note = Phosphorothioate (PS) linkage
  modified_base 2: mod_base = um
  modified_base 3: mod_base = OTHER; note = Phosphorothioate (PS) linkage
  modified_base 3: mod_base = gm
  modified_base 4: mod_base = OTHER; note = Phosphorothioate (PS) linkage
  modified_base 29: mod_base = gm
  modified_base 30: mod_base = cm
  modified_base 31: mod_base = um
  modified_base 32: mod_base = OTHER; note = 2'-O-methyladenosine
  modified_base 33: mod_base = gm
  modified_base 34: mod_base = OTHER; note = 2'-O-methyladenosine
  modified_base 35: mod_base = OTHER; note = 2'-O-methyladenosine
  modified_base 36: mod_base = OTHER; note = 2'-O-methyladenosine
  modified_base 37: mod_base = um
  modified_base 38: mod_base = OTHER; note = 2'-O-methyladenosine
  modified_base 39: mod_base = gm
  modified_base 40: mod_base = cm
  modified_base 68: mod_base = OTHER; note = 2'-O-methyladenosine
  modified_base 69: mod_base = OTHER; note = 2'-O-methyladenosine
  modified_base 70: mod_base = cm
  modified_base 71: mod_base = um
  modified_base 72: mod_base = um
  modified_base 73: mod_base = gm
  modified_base 74: mod_base = OTHER; note = 2'-O-methyladenosine
  modified_base 75: mod_base = OTHER; note = 2'-O-methyladenosine
  modified_base 76: mod_base = OTHER; note = 2'-O-methyladenosine
  modified_base 77: mod_base = OTHER; note = 2'-O-methyladenosine
  modified_base 78: mod_base = OTHER; note = 2'-O-methyladenosine
  modified_base 79: mod_base = gm
  modified_base 80: mod_base = um
  modified_base 81: mod_base = gm
  modified_base 82: mod_base = gm
  modified_base 83: mod_base = cm
  modified_base 84: mod_base = OTHER; note = 2'-O-methyladenosine
  modified_base 85: mod_base = cm
  modified_base 86: mod_base = cm
  modified_base 87: mod_base = gm
  modified_base 88: mod_base = OTHER; note = 2'-O-methyladenosine
  modified_base 89: mod_base = gm
  modified_base 90: mod_base = um
  modified_base 91: mod_base = cm
  modified_base 92: mod_base = gm
  modified_base 93: mod_base = gm
  modified_base 94: mod_base = um
  modified_base 95: mod_base = gm
  modified_base 96: mod_base = cm
  modified_base 98: mod_base = OTHER; note = 2' fluoro modified base
  modified_base 101: mod_base = OTHER; note = 2' fluoro modified base
  modified_base 104: mod_base = OTHER; note = 2' fluoro modified base
  modified_base 107: mod_base = OTHER; note = 2' fluoro modified base
  modified_base 110: mod_base = OTHER; note = 2' fluoro modified base
  modified_base 113: mod_base = OTHER; note = 2' fluoro modified base
  modified_base 116: mod_base = OTHER; note = 2' fluoro modified base
  modified_base 119: mod_base = um
  modified_base 120: mod_base = OTHER; note = Phosphorothioate (PS) linkage
  modified_base 120: mod_base = um
  modified_base 121: mod_base = OTHER; note = Phosphorothioate (PS) linkage
  modified_base 121: mod_base = um
  modified_base 122: mod_base = OTHER; note = Phosphorothioate (PS) linkage
  modified_base 122: mod_base = um
  source 1..122: mol_type = other RNA

SEQ ID NO: 1090 - RNA, 122 nt, synthetic construct; identical to SEQ ID NO: 37
  modified_base 1: mod_base = um
  modified_base 2: mod_base = OTHER; note = Phosphorothioate (PS) linkage
  modified_base 2: mod_base = um
  modified_base 3: mod_base = OTHER; note = Phosphorothioate (PS) linkage
  modified_base 3: mod_base = gm
  modified_base 4: mod_base = OTHER; note = Phosphorothioate (PS) linkage
  modified_base 29: mod_base = gm
  modified_base 30: mod_base = cm
  modified_base 31: mod_base = um
  modified_base 32: mod_base = OTHER; note = 2'-O-methyladenosine
  modified_base 33: mod_base = gm
  modified_base 34: mod_base = OTHER; note = 2'-O-methyladenosine
  modified_base 35: mod_base = OTHER; note = 2'-O-methyladenosine
  modified_base 36: mod_base = OTHER; note = 2'-O-methyladenosine
  modified_base 37: mod_base = um
  modified_base 38: mod_base = OTHER; note = 2'-O-methyladenosine
  modified_base 39: mod_base = gm
  modified_base 40: mod_base = cm
  modified_base 68: mod_base = OTHER; note = 2'-O-methyladenosine
  modified_base 69: mod_base = OTHER; note = 2'-O-methyladenosine
  modified_base 70: mod_base = cm
  modified_base 71: mod_base = um
  modified_base 72: mod_base = um
  modified_base 73: mod_base = gm
  modified_base 74: mod_base = OTHER; note = 2'-O-methyladenosine
  modified_base 75: mod_base = OTHER; note = 2'-O-methyladenosine
  modified_base 76: mod_base = OTHER; note = 2'-O-methyladenosine
  modified_base 77: mod_base = OTHER; note = 2'-O-methyladenosine
  modified_base 78: mod_base = OTHER; note = 2'-O-methyladenosine
  modified_base 79: mod_base = gm
  modified_base 80: mod_base = um
  modified_base 81: mod_base = gm
  modified_base 82: mod_base = gm
  modified_base 83: mod_base = cm
  modified_base 84: mod_base = OTHER; note = 2'-O-methyladenosine
  modified_base 85: mod_base = cm
  modified_base 86: mod_base = cm
  modified_base 87: mod_base = gm
  modified_base 88: mod_base = OTHER; note = 2'-O-methyladenosine
  modified_base 89: mod_base = gm
  modified_base 90: mod_base = um
  modified_base 91: mod_base = cm
  modified_base 92: mod_base = gm
  modified_base 93: mod_base = gm
  modified_base 94: mod_base = um
  modified_base 95: mod_base = gm
  modified_base 96: mod_base = cm
  modified_base 113: mod_base = OTHER; note = 2' fluoro modified base
  modified_base 116: mod_base = OTHER; note = 2' fluoro modified base
  modified_base 119: mod_base = um
  modified_base 120: mod_base = OTHER; note = Phosphorothioate (PS) linkage
  modified_base 120: mod_base = um
  modified_base 121: mod_base = OTHER; note = Phosphorothioate (PS) linkage
  modified_base 121: mod_base = um
  modified_base 122: mod_base = OTHER; note = Phosphorothioate (PS) linkage
  modified_base 122: mod_base = um
  source 1..122: mol_type = other RNA

SEQ ID NO: 1091 - RNA, 122 nt, synthetic construct; identical to SEQ ID NO: 37
  modified_base 1: mod_base = um
  modified_base 2: mod_base = OTHER; note = Phosphorothioate (PS) linkage
  modified_base 2: mod_base = um
  modified_base 3: mod_base = OTHER; note = Phosphorothioate (PS) linkage
  modified_base 3: mod_base = gm
  modified_base 4: mod_base = OTHER; note = Phosphorothioate (PS) linkage
  modified_base 29: mod_base = gm
  modified_base 30: mod_base = cm
  modified_base 31: mod_base = um
  modified_base 32: mod_base = OTHER; note = 2'-O-methyladenosine
  modified_base 33: mod_base = gm
  modified_base 34: mod_base = OTHER; note = 2'-O-methyladenosine
  modified_base 35: mod_base = OTHER; note = 2'-O-methyladenosine
  modified_base 36: mod_base = OTHER; note = 2'-O-methyladenosine
  modified_base 37: mod_base = um
  modified_base 38: mod_base = OTHER; note = 2'-O-methyladenosine
  modified_base 39: mod_base = gm
  modified_base 40: mod_base = cm
  modified_base 68: mod_base = OTHER; note = 2'-O-methyladenosine
  modified_base 69: mod_base = OTHER; note = 2'-O-methyladenosine
  modified_base 70: mod_base = cm
  modified_base 71: mod_base = um
  modified_base 72: mod_base = um
  modified_base 73: mod_base = gm
  modified_base 74: mod_base = OTHER; note = 2'-O-methyladenosine
  modified_base 75: mod_base = OTHER; note = 2'-O-methyladenosine
  modified_base 76: mod_base = OTHER; note = 2'-O-methyladenosine
  modified_base 77: mod_base = OTHER; note = 2'-O-methyladenosine
  modified_base 78: mod_base = OTHER; note = 2'-O-methyladenosine
  modified_base 79: mod_base = gm
  modified_base 80: mod_base = um
  modified_base 81: mod_base = gm
  modified_base 82: mod_base = gm
  modified_base 83: mod_base = cm
  modified_base 84: mod_base = OTHER; note = 2'-O-methyladenosine
  modified_base 85: mod_base = cm
  modified_base 86: mod_base = cm
  modified_base 87: mod_base = gm
  modified_base 88: mod_base = OTHER; note = 2'-O-methyladenosine
  modified_base 89: mod_base = gm
  modified_base 90: mod_base = um
  modified_base 91: mod_base = cm
  modified_base 92: mod_base = gm
  modified_base 93: mod_base = gm
  modified_base 94: mod_base = um
  modified_base 95: mod_base = gm
  modified_base 96: mod_base = cm
  modified_base 98: mod_base = OTHER; note = 2' fluoro modified base
  modified_base 101: mod_base = OTHER; note = 2' fluoro modified base
  modified_base 104: mod_base = OTHER; note = 2' fluoro modified base
  modified_base 107: mod_base = OTHER; note = 2' fluoro modified base
  modified_base 110: mod_base = OTHER; note = 2' fluoro modified base
  modified_base 119: mod_base = um
  modified_base 120: mod_base = OTHER; note = Phosphorothioate (PS) linkage
  modified_base 120: mod_base = um
  modified_base 121: mod_base = OTHER; note = Phosphorothioate (PS) linkage
  modified_base 121: mod_base = um
  modified_base 122: mod_base = OTHER; note = Phosphorothioate (PS) linkage
  modified_base 122: mod_base = um
  source 1..122: mol_type = other RNA

SEQ ID NO: 1092 - RNA, 122 nt, synthetic construct; identical to SEQ ID NO: 37
  modified_base 1: mod_base = um
  modified_base 2: mod_base = OTHER; note = Phosphorothioate (PS) linkage
  modified_base 2: mod_base = um
  modified_base 3: mod_base = OTHER; note = Phosphorothioate (PS) linkage
  modified_base 3: mod_base = gm
  modified_base 4: mod_base = OTHER; note = Phosphorothioate (PS) linkage
  modified_base 29: mod_base = gm
  modified_base 30: mod_base = cm
  modified_base 31: mod_base = um
  modified_base 32: mod_base = OTHER; note = 2'-O-methyladenosine
  modified_base 33: mod_base = gm
  modified_base 34: mod_base = OTHER; note = 2'-O-methyladenosine
  modified_base 35: mod_base = OTHER; note = 2'-O-methyladenosine
  modified_base 36: mod_base = OTHER; note = 2'-O-methyladenosine
  modified_base 37: mod_base = um
  modified_base 38: mod_base = OTHER; note = 2'-O-methyladenosine
  modified_base 39: mod_base = gm
  modified_base 40: mod_base = cm
  modified_base 68: mod_base = OTHER; note = 2'-O-methyladenosine
  modified_base 69: mod_base = OTHER; note = 2'-O-methyladenosine
  modified_base 70: mod_base = cm
  modified_base 71: mod_base = um
  modified_base 72: mod_base = um
  modified_base 73: mod_base = gm
  modified_base 74: mod_base = OTHER; note = 2'-O-methyladenosine
  modified_base 75: mod_base = OTHER; note = 2'-O-methyladenosine
  modified_base 76: mod_base = OTHER; note = 2'-O-methyladenosine
  modified_base 77: mod_base = OTHER; note = 2'-O-methyladenosine
  modified_base 78: mod_base = OTHER; note = 2'-O-methyladenosine
  modified_base 79: mod_base = gm
  modified_base 80: mod_base = um
  modified_base 81: mod_base = gm
  modified_base 82: mod_base = gm
  modified_base 83: mod_base = cm
  modified_base 84: mod_base = OTHER; note = 2'-O-methyladenosine
  modified_base 85: mod_base = cm
  modified_base 86: mod_base = cm
  modified_base 87: mod_base = gm
  modified_base 88: mod_base = OTHER; note = 2'-O-methyladenosine
  modified_base 89: mod_base = gm
  modified_base 90: mod_base = um
  modified_base 91: mod_base = cm
  modified_base 92: mod_base = gm
  modified_base 93: mod_base = gm
  modified_base 94: mod_base = um
  modified_base 95: mod_base = gm
  modified_base 96: mod_base = cm
  modified_base 97: mod_base = OTHER; note = 2' fluoro modified base
  modified_base 100: mod_base = OTHER; note = 2' fluoro modified base
  modified_base 103: mod_base = OTHER; note = 2' fluoro modified base
  modified_base 106: mod_base = OTHER; note = 2' fluoro modified base
  modified_base 109: mod_base = OTHER; note = 2' fluoro modified base
  modified_base 112: mod_base = OTHER; note = 2' fluoro modified base
  modified_base 115: mod_base = OTHER; note = 2' fluoro modified base
  modified_base 118: mod_base = OTHER; note = 2' fluoro modified base
  modified_base 119: mod_base = um
  modified_base 120: mod_base = OTHER; note = Phosphorothioate (PS) linkage
  modified_base 120: mod_base = um
  modified_base 121: mod_base = OTHER; note = Phosphorothioate (PS) linkage
  modified_base 121: mod_base = um
  modified_base 122: mod_base = OTHER; note = Phosphorothioate (PS) linkage
  modified_base 122: mod_base = um
  source 1..122: mol_type = other RNA

SEQ ID NO: 1093 - RNA, 122 nt, synthetic construct; identical to SEQ ID NO: 37
  modified_base 1: mod_base = um
  modified_base 2: mod_base = OTHER; note = Phosphorothioate (PS) linkage
  modified_base 2: mod_base = um
  modified_base 3: mod_base = OTHER; note = Phosphorothioate (PS) linkage
  modified_base 3: mod_base = gm
  modified_base 4: mod_base = OTHER; note = Phosphorothioate (PS) linkage
  modified_base 29: mod_base = gm
  modified_base 30: mod_base = cm
  modified_base 31: mod_base = um
  modified_base 32: mod_base = OTHER; note = 2'-O-methyladenosine
  modified_base 33: mod_base = gm
  modified_base 34: mod_base = OTHER; note = 2'-O-methyladenosine
  modified_base 35: mod_base = OTHER; note = 2'-O-methyladenosine
  modified_base 36: mod_base = OTHER; note = 2'-O-methyladenosine
  modified_base 37: mod_base = um
  modified_base 38: mod_base = OTHER; note = 2'-O-methyladenosine
  modified_base 39: mod_base = gm
  modified_base 40: mod_base = cm
  modified_base 68: mod_base = OTHER; note = 2'-O-methyladenosine
  modified_base 69: mod_base = OTHER; note = 2'-O-methyladenosine
  modified_base 70: mod_base = cm
  modified_base 71: mod_base = um
  modified_base 72: mod_base = um
  modified_base 73: mod_base = gm
  modified_base 74: mod_base = OTHER; note = 2'-O-methyladenosine
  modified_base 75: mod_base = OTHER; note = 2'-O-methyladenosine
  modified_base 76: mod_base = OTHER; note = 2'-O-methyladenosine
  modified_base 77: mod_base = OTHER; note = 2'-O-methyladenosine
  modified_base 78: mod_base = OTHER; note = 2'-O-methyladenosine
  modified_base 79: mod_base = gm
  modified_base 80: mod_base = um
  modified_base 81: mod_base = gm
  modified_base 82: mod_base = gm
  modified_base 83: mod_base = cm
  modified_base 84: mod_base = OTHER; note = 2'-O-methyladenosine
  modified_base 85: mod_base = cm
  modified_base 86: mod_base = cm
  modified_base 87: mod_base = gm
  modified_base 88: mod_base = OTHER; note = 2'-O-methyladenosine
  modified_base 89: mod_base = gm
  modified_base 90: mod_base = um
  modified_base 91: mod_base = cm
  modified_base 92: mod_base = gm
  modified_base 93: mod_base = gm
  modified_base 94: mod_base = um
  modified_base 95: mod_base = gm
  modified_base 96: mod_base = cm
  modified_base 112: mod_base = OTHER; note = 2' fluoro modified base
  modified_base 115: mod_base = OTHER; note = 2' fluoro modified base
  modified_base 118: mod_base = OTHER; note = 2' fluoro modified base
  modified_base 119: mod_base = um
  modified_base 120: mod_base = OTHER; note = Phosphorothioate (PS) linkage
  modified_base 120: mod_base = um
  modified_base 121: mod_base = OTHER; note = Phosphorothioate (PS) linkage
  modified_base 121: mod_base = um
  modified_base 122: mod_base = OTHER; note = Phosphorothioate (PS) linkage
  modified_base 122: mod_base = um
  source 1..122: mol_type = other RNA

SEQ ID NO: 1094 - RNA, 122 nt, synthetic construct; identical to SEQ ID NO: 37
  modified_base 1: mod_base = um
  modified_base 2: mod_base = OTHER; note = Phosphorothioate (PS) linkage
  modified_base 2: mod_base = um
  modified_base 3: mod_base = OTHER; note = Phosphorothioate (PS) linkage
  modified_base 3: mod_base = gm
  modified_base 4: mod_base = OTHER; note = Phosphorothioate (PS) linkage
  modified_base 29: mod_base = gm
  modified_base 30: mod_base = cm
  modified_base 31: mod_base = um
  modified_base 32: mod_base = OTHER; note = 2'-O-methyladenosine
  modified_base 33: mod_base = gm
  modified_base 34: mod_base = OTHER; note = 2'-O-methyladenosine
  modified_base 35: mod_base = OTHER; note = 2'-O-methyladenosine
  modified_base 36: mod_base = OTHER; note = 2'-O-methyladenosine
  modified_base 37: mod_base = um
  modified_base 38: mod_base = OTHER; note = 2'-O-methyladenosine
  modified_base 39: mod_base = gm
  modified_base 40: mod_base = cm
  modified_base 68: mod_base = OTHER; note = 2'-O-methyladenosine
  modified_base 69: mod_base = OTHER; note = 2'-O-methyladenosine
  modified_base 70: mod_base = cm
  modified_base 71: mod_base = um
  modified_base 72: mod_base = um
  modified_base 73: mod_base = gm
  modified_base 74: mod_base = OTHER; note = 2'-O-methyladenosine
  modified_base 75: mod_base = OTHER; note = 2'-O-methyladenosine
  modified_base 76: mod_base = OTHER; note = 2'-O-methyladenosine
  modified_base 77: mod_base = OTHER; note = 2'-O-methyladenosine
  modified_base 78: mod_base = OTHER; note = 2'-O-methyladenosine
  modified_base 79: mod_base = gm
  modified_base 80: mod_base = um
  modified_base 81: mod_base = gm
  modified_base 82: mod_base = gm
  modified_base 83: mod_base = cm
  modified_base 84: mod_base = OTHER; note = 2'-O-methyladenosine
  modified_base 85: mod_base = cm
  modified_base 86: mod_base = cm
  modified_base 87: mod_base = gm
  modified_base 88: mod_base = OTHER; note = 2'-O-methyladenosine
  modified_base 89: mod_base = gm
  modified_base 90: mod_base = um
  modified_base 91: mod_base = cm
  modified_base 92: mod_base = gm
  modified_base 93: mod_base = gm
  modified_base 94: mod_base = um
  modified_base 95: mod_base = gm
  modified_base 96: mod_base = cm
  modified_base 97: mod_base = OTHER; note = 2' fluoro modified base
  modified_base 100: mod_base = OTHER; note = 2' fluoro modified base
  modified_base 103: mod_base = OTHER; note = 2' fluoro modified base
  modified_base 106: mod_base = OTHER; note = 2' fluoro modified base
  modified_base 109: mod_base = OTHER; note = 2' fluoro modified base
  modified_base 119: mod_base = um
  modified_base 120: mod_base = OTHER; note = Phosphorothioate (PS) linkage
  modified_base 120: mod_base = um
  modified_base 121: mod_base = OTHER; note = Phosphorothioate (PS) linkage
  modified_base 121: mod_base = um
  modified_base 122: mod_base = OTHER; note = Phosphorothioate (PS) linkage
  modified_base 122: mod_base = um
  source 1..122: mol_type = other RNA

SEQ ID NO: 1095 - RNA, 122 nt, synthetic construct; identical to SEQ ID NO: 37
  modified_base 1: mod_base = um
  modified_base 2: mod_base = OTHER; note = Phosphorothioate (PS) linkage
  modified_base 2: mod_base = um
  modified_base 3: mod_base = OTHER; note = Phosphorothioate (PS) linkage
  modified_base 3: mod_base = gm
  modified_base 4: mod_base = OTHER; note = Phosphorothioate (PS) linkage
  modified_base 29: mod_base = gm
  modified_base 30: mod_base = cm
  modified_base 31: mod_base = um
  modified_base 32: mod_base = OTHER; note = 2'-O-methyladenosine
  modified_base 33: mod_base = gm
  modified_base 34: mod_base = OTHER; note = 2'-O-methyladenosine
  modified_base 35: mod_base = OTHER; note = 2'-O-methyladenosine
  modified_base 36: mod_base = OTHER; note = 2'-O-methyladenosine
  modified_base 37: mod_base = um
  modified_base 38: mod_base = OTHER; note = 2'-O-methyladenosine
  modified_base 39: mod_base = gm
  modified_base 40: mod_base = cm
  modified_base 68: mod_base = OTHER; note = 2'-O-methyladenosine
  modified_base 69: mod_base = OTHER; note = 2'-O-methyladenosine
  modified_base 70: mod_base = cm
  modified_base 71: mod_base = um
  modified_base 72: mod_base = um
  modified_base 73: mod_base = gm
  modified_base 74: mod_base = OTHER; note = 2'-O-methyladenosine
  modified_base 75: mod_base = OTHER; note = 2'-O-methyladenosine
  modified_base 76: mod_base = OTHER; note = 2'-O-methyladenosine
  modified_base 77: mod_base = OTHER; note = 2'-O-methyladenosine
  modified_base 78: mod_base = OTHER; note = 2'-O-methyladenosine
  modified_base 79: mod_base = gm
  modified_base 80: mod_base = um
  modified_base 81: mod_base = gm
  modified_base 82: mod_base = gm
  modified_base 83: mod_base = cm
  modified_base 84: mod_base = OTHER; note = 2'-O-methyladenosine
  modified_base 85: mod_base = cm
  modified_base 86: mod_base = cm
  modified_base 87: mod_base = gm
  modified_base 88: mod_base = OTHER; note = 2'-O-methyladenosine
  modified_base 89: mod_base = gm
  modified_base 90: mod_base = um
  modified_base 91: mod_base = cm
  modified_base 92: mod_base = gm
  modified_base 93: mod_base = gm
  modified_base 94: mod_base = um
  modified_base 95: mod_base = gm
  modified_base 96: mod_base = cm
  modified_base 99: mod_base = OTHER; note = 2' fluoro modified base
  modified_base 102: mod_base = OTHER; note = 2' fluoro modified base
  modified_base 105: mod_base = OTHER; note = 2' fluoro modified base
  modified_base 108: mod_base = OTHER; note = 2' fluoro modified base
  modified_base 113: mod_base = OTHER; note = 2' fluoro modified base
  modified_base 116: mod_base = OTHER; note = 2' fluoro modified base
  modified_base 119: mod_base = um
  modified_base 120: mod_base = OTHER; note = Phosphorothioate (PS) linkage
  modified_base 120: mod_base = um
  modified_base 121: mod_base = OTHER; note = Phosphorothioate (PS) linkage
  modified_base 121: mod_base = um
  modified_base 122: mod_base = OTHER; note = Phosphorothioate (PS) linkage
  modified_base 122: mod_base = um
  source 1..122: mol_type = other RNA

SEQ ID NO: 1096 - RNA, 122 nt, synthetic construct; identical to SEQ ID NO: 37
  modified_base 1: mod_base = um
  modified_base 2: mod_base = OTHER; note = Phosphorothioate (PS) linkage
  modified_base 2: mod_base = um
  modified_base 3: mod_base = OTHER; note = Phosphorothioate (PS) linkage
  modified_base 3: mod_base = gm
  modified_base 4: mod_base = OTHER; note = Phosphorothioate (PS) linkage
  modified_base 29: mod_base = gm
  modified_base 30: mod_base = cm
  modified_base 31: mod_base = um
  modified_base 32: mod_base = OTHER; note = 2'-O-methyladenosine
  modified_base 33: mod_base = gm
  modified_base 34: mod_base = OTHER; note = 2'-O-methyladenosine
  modified_base 35: mod_base = OTHER; note = 2'-O-methyladenosine
  modified_base 36: mod_base = OTHER; note = 2'-O-methyladenosine
  modified_base 37: mod_base = um
  modified_base 38: mod_base = OTHER; note = 2'-O-methyladenosine
  modified_base 39: mod_base = gm
  modified_base 40: mod_base = cm
  modified_base 68: mod_base = OTHER; note = 2'-O-methyladenosine
  modified_base 69: mod_base = OTHER; note = 2'-O-methyladenosine
  modified_base 70: mod_base = cm
  modified_base 71: mod_base = um
  modified_base 72: mod_base = um
  modified_base 73: mod_base = gm
  modified_base 74: mod_base = OTHER; note = 2'-O-methyladenosine
  modified_base 75: mod_base = OTHER; note = 2'-O-methyladenosine
  modified_base 76: mod_base = OTHER; note = 2'-O-methyladenosine
  modified_base 77: mod_base = OTHER; note = 2'-O-methyladenosine
  modified_base 78: mod_base = OTHER; note = 2'-O-methyladenosine
  modified_base 79: mod_base = gm
  modified_base 80: mod_base = um
  modified_base 81: mod_base = gm
  modified_base 82: mod_base = gm
  modified_base 83: mod_base = cm
  modified_base 84: mod_base = OTHER; note = 2'-O-methyladenosine
  modified_base 85: mod_base = cm
  modified_base 86: mod_base = cm
  modified_base 87: mod_base = gm
  modified_base 88: mod_base = OTHER; note = 2'-O-methyladenosine
  modified_base 89: mod_base = gm
  modified_base 90: mod_base = um
  modified_base 91: mod_base = cm
  modified_base 92: mod_base = gm
  modified_base 93: mod_base = gm
  modified_base 94: mod_base = um
  modified_base 95: mod_base = gm
  modified_base 96: mod_base = cm
  modified_base 99: mod_base = OTHER; note = 2' fluoro modified base
  modified_base 102: mod_base = OTHER; note = 2' fluoro modified base
  modified_base 105: mod_base = OTHER; note = 2' fluoro modified base
  modified_base 108: mod_base = OTHER; note = 2' fluoro modified base
  modified_base 112: mod_base = OTHER; note = 2' fluoro modified base
  modified_base 115: mod_base = OTHER; note = 2' fluoro modified base
  modified_base 118: mod_base = OTHER; note = 2' fluoro modified base
  modified_base 119: mod_base = um
  modified_base 120: mod_base = OTHER; note = Phosphorothioate (PS) linkage
  modified_base 120: mod_base = um
  modified_base 121: mod_base = OTHER; note = Phosphorothioate (PS) linkage
  modified_base 121: mod_base = um
  modified_base 122: mod_base = OTHER; note = Phosphorothioate (PS) linkage
  modified_base 122: mod_base = um
  source 1..122: mol_type = other RNA

SEQ ID NO: 1097 - RNA, 122 nt, synthetic construct; identical to SEQ ID NO: 37
  modified_base 1: mod_base = um
  modified_base 2: mod_base = OTHER; note = Phosphorothioate (PS) linkage
  modified_base 2: mod_base = um
  modified_base 3: mod_base = OTHER; note = Phosphorothioate (PS) linkage
  modified_base 3: mod_base = gm
  modified_base 4: mod_base = OTHER; note = Phosphorothioate (PS) linkage
  modified_base 29: mod_base = gm
  modified_base 30: mod_base = cm
  modified_base 31: mod_base = um
  modified_base 32: mod_base = OTHER; note = 2'-O-methyladenosine
  modified_base 33: mod_base = gm
  modified_base 34: mod_base = OTHER; note = 2'-O-methyladenosine
  modified_base 35: mod_base = OTHER; note = 2'-O-methyladenosine
  modified_base 36: mod_base = OTHER; note = 2'-O-methyladenosine
  modified_base 37: mod_base = um
  modified_base 38: mod_base = OTHER; note = 2'-O-methyladenosine
  modified_base 39: mod_base = gm
  modified_base 40: mod_base = cm
  modified_base 68: mod_base = OTHER; note = 2'-O-methyladenosine
  modified_base 69: mod_base = OTHER; note = 2'-O-methyladenosine
  modified_base 70: mod_base = cm
  modified_base 71: mod_base = um
  modified_base 72: mod_base = um
  modified_base 73: mod_base = gm
  modified_base 74: mod_base = OTHER; note = 2'-O-methyladenosine
  modified_base 75: mod_base = OTHER; note = 2'-O-methyladenosine
  modified_base 76: mod_base = OTHER; note = 2'-O-methyladenosine
  modified_base 77: mod_base = OTHER; note = 2'-O-methyladenosine
  modified_base 78: mod_base = OTHER; note = 2'-O-methyladenosine
  modified_base 79: mod_base = gm
  modified_base 80: mod_base = um
  modified_base 81: mod_base = gm
  modified_base 82: mod_base = gm
  modified_base 83: mod_base = cm
  modified_base 84: mod_base = OTHER; note = 2'-O-methyladenosine
  modified_base 85: mod_base = cm
  modified_base 86: mod_base = cm
  modified_base 87: mod_base = gm
  modified_base 88: mod_base = OTHER; note = 2'-O-methyladenosine
  modified_base 89: mod_base = gm
  modified_base 90: mod_base = um
  modified_base 91: mod_base = cm
  modified_base 92: mod_base = gm
  modified_base 93: mod_base = gm
  modified_base 94: mod_base = um
  modified_base 95: mod_base = gm
  modified_base 96: mod_base = cm
  modified_base 99: mod_base = OTHER; note = 2' fluoro modified base
  modified_base 102: mod_base = OTHER; note = 2' fluoro modified base
  modified_base 105: mod_base = OTHER; note = 2' fluoro modified base
  modified_base 108: mod_base = OTHER; note = 2' fluoro modified base
  modified_base 111: mod_base = OTHER; note = 2' fluoro modified base
  modified_base 112: mod_base = gm
  modified_base 114: mod_base = OTHER; note = 2' fluoro modified base
  modified_base 115: mod_base = um
  modified_base 117: mod_base = OTHER; note = 2' fluoro modified base
  modified_base 118: mod_base = cm
  modified_base 119: mod_base = um
  modified_base 120: mod_base = OTHER; note = Phosphorothioate (PS) linkage
  modified_base 120: mod_base = um
  modified_base 121: mod_base = OTHER; note = Phosphorothioate (PS) linkage
  modified_base 121: mod_base = um
  modified_base 122: mod_base = OTHER; note = Phosphorothioate (PS) linkage
  modified_base 122: mod_base = um
  source 1..122: mol_type = other RNA

SEQ ID NO: 1098 - RNA, 122 nt, synthetic construct; identical to SEQ ID NO: 37
  modified_base 1: mod_base = um
  modified_base 2: mod_base = OTHER; note = Phosphorothioate (PS) linkage
  modified_base 2: mod_base = um
  modified_base 3: mod_base = OTHER; note = Phosphorothioate (PS) linkage
  modified_base 3: mod_base = gm
  modified_base 4: mod_base = OTHER; note = Phosphorothioate (PS) linkage
  modified_base 29: mod_base = gm
  modified_base 30: mod_base = cm
  modified_base 31: mod_base = um
  modified_base 32: mod_base = OTHER; note = 2'-O-methyladenosine
  modified_base 33: mod_base = gm
  modified_base 34: mod_base = OTHER; note = 2'-O-methyladenosine
  modified_base 35: mod_base = OTHER; note = 2'-O-methyladenosine
  modified_base 36: mod_base = OTHER; note = 2'-O-methyladenosine
  modified_base 37: mod_base = um
  modified_base 38: mod_base = OTHER; note = 2'-O-methyladenosine
  modified_base 39: mod_base = gm
  modified_base 40: mod_base = cm
  modified_base 68: mod_base = OTHER; note = 2'-O-methyladenosine
  modified_base 69: mod_base = OTHER; note = 2'-O-methyladenosine
  modified_base 70: mod_base = cm
  modified_base 71: mod_base = um
  modified_base 72: mod_base = um
  modified_base 73: mod_base = gm
  modified_base 74: mod_base = OTHER; note = 2'-O-methyladenosine
  modified_base 75: mod_base = OTHER; note = 2'-O-methyladenosine
  modified_base 76: mod_base = OTHER; note = 2'-O-methyladenosine
  modified_base 77: mod_base = OTHER; note = 2'-O-methyladenosine
  modified_base 78: mod_base = OTHER; note = 2'-O-methyladenosine
  modified_base 79: mod_base = gm
  modified_base 80: mod_base = um
  modified_base 81: mod_base = gm
  modified_base 82: mod_base = gm
  modified_base 83: mod_base = cm
  modified_base 84: mod_base = OTHER; note = 2'-O-methyladenosine
  modified_base 85: mod_base = cm
  modified_base 86: mod_base = cm
  modified_base 87: mod_base = gm
  modified_base 88: mod_base = OTHER; note = 2'-O-methyladenosine
  modified_base 89: mod_base = gm
  modified_base 90: mod_base = um
  modified_base 91: mod_base = cm
  modified_base 92: mod_base = gm
  modified_base 93: mod_base = gm
  modified_base 94: mod_base = um
  modified_base 95: mod_base = gm
  modified_base 96: mod_base = cm
  modified_base 99: mod_base = OTHER; note = 2' fluoro modified base
  modified_base 102: mod_base = OTHER; note = 2' fluoro modified base
  modified_base 105: mod_base = OTHER; note = 2' fluoro modified base
  modified_base 108: mod_base = OTHER; note = 2' fluoro modified base
  modified_base 111: mod_base = OTHER; note = 2' fluoro modified base
  modified_base 113: mod_base = cm
  modified_base 114: mod_base = OTHER; note = 2' fluoro modified base
  modified_base 116: mod_base = gm
  modified_base 117: mod_base = OTHER; note = 2' fluoro modified base
  modified_base 119: mod_base = um
  modified_base 120: mod_base = OTHER; note = Phosphorothioate (PS) linkage
  modified_base 120: mod_base = um
  modified_base 121: mod_base = OTHER; note = Phosphorothioate (PS) linkage
  modified_base 121: mod_base = um
  modified_base 122: mod_base = OTHER; note = Phosphorothioate (PS) linkage
  modified_base 122: mod_base = um
  source 1..122: mol_type = other RNA

SEQ ID NO: 1099 - RNA, 122 nt, synthetic construct; identical to SEQ ID NO: 37
  modified_base 1: mod_base = um
  modified_base 2: mod_base = OTHER; note = Phosphorothioate (PS) linkage
  modified_base 2: mod_base = um
  modified_base 3: mod_base = OTHER; note = Phosphorothioate (PS) linkage
  modified_base 3: mod_base = gm
  modified_base 4: mod_base = OTHER; note = Phosphorothioate (PS) linkage
  modified_base 29: mod_base = gm
  modified_base 30: mod_base = cm
  modified_base 31: mod_base = um
  modified_base 32: mod_base = OTHER; note = 2'-O-methyladenosine
  modified_base 33: mod_base = gm
  modified_base 34: mod_base = OTHER; note = 2'-O-methyladenosine
  modified_base 35: mod_base = OTHER; note = 2'-O-methyladenosine
  modified_base 36: mod_base = OTHER; note = 2'-O-methyladenosine
  modified_base 37: mod_base = um
  modified_base 38: mod_base = OTHER; note = 2'-O-methyladenosine
  modified_base 39: mod_base = gm
  modified_base 40: mod_base = cm
  modified_base 68: mod_base = OTHER; note = 2'-O-methyladenosine
  modified_base 69: mod_base = OTHER; note = 2'-O-methyladenosine
  modified_base 70: mod_base = cm
  modified_base 71: mod_base = um
  modified_base 72: mod_base = um
  modified_base 73: mod_base = gm
  modified_base 74: mod_base = OTHER; note = 2'-O-methyladenosine
  modified_base 75: mod_base = OTHER; note = 2'-O-methyladenosine
  modified_base 76: mod_base = OTHER; note = 2'-O-methyladenosine
  modified_base 77: mod_base = OTHER; note = 2'-O-methyladenosine
  modified_base 78: mod_base = OTHER; note = 2'-O-methyladenosine
  modified_base 79: mod_base = gm
  modified_base 80: mod_base = um
  modified_base 81: mod_base = gm
  modified_base 82: mod_base = gm
  modified_base 83: mod_base = cm
  modified_base 84: mod_base = OTHER; note = 2'-O-methyladenosine
  modified_base 85: mod_base = cm
  modified_base 86: mod_base = cm
  modified_base 87: mod_base = gm
  modified_base 88: mod_base = OTHER; note = 2'-O-methyladenosine
  modified_base 89: mod_base = gm
  modified_base 90: mod_base = um
  modified_base 91: mod_base = cm
  modified_base 92: mod_base = gm
  modified_base 93: mod_base = gm
  modified_base 94: mod_base = um
  modified_base 95: mod_base = gm
  modified_base 96: mod_base = cm
  modified_base 99: mod_base = OTHER; note = 2' fluoro modified base
  modified_base 102: mod_base = OTHER; note = 2' fluoro modified base
  modified_base 105: mod_base = OTHER; note = 2' fluoro modified base
  modified_base 108: mod_base = OTHER; note = 2' fluoro modified base
  modified_base 111: mod_base = OTHER; note = 2' fluoro modified base
  modified_base 112: mod_base = gm
  modified_base 113: mod_base = cm
  modified_base 114: mod_base = OTHER; note = 2' fluoro modified base
  modified_base 115: mod_base = um
  modified_base 116: mod_base = gm
  modified_base 117: mod_base = OTHER; note = 2' fluoro modified base
  modified_base 118: mod_base = cm
  modified_base 119: mod_base = um
  modified_base 120: mod_base = OTHER; note = Phosphorothioate (PS) linkage
  modified_base 120: mod_base = um
  modified_base 121: mod_base = OTHER; note = Phosphorothioate (PS) linkage
  modified_base 121: mod_base = um
  modified_base 122: mod_base = OTHER; note = Phosphorothioate (PS) linkage
  modified_base 122: mod_base = um
  source 1..122: mol_type = other RNA

SEQ ID NO: 1100 - RNA, 122 nt, synthetic construct; identical to SEQ ID NO: 37
  modified_base 1: mod_base = um
  modified_base 2: mod_base = OTHER; note = Phosphorothioate (PS) linkage
  modified_base 2: mod_base = um
  modified_base 3: mod_base = OTHER; note = Phosphorothioate (PS) linkage
  modified_base 3: mod_base = gm
  modified_base 4: mod_base = OTHER; note = Phosphorothioate (PS) linkage
  modified_base 29: mod_base = gm
  modified_base 30: mod_base = cm
  modified_base 31: mod_base = um
  modified_base 32: mod_base = OTHER; note = 2'-O-methyladenosine
  modified_base 33: mod_base = gm
  modified_base 34: mod_base = OTHER; note = 2'-O-methyladenosine
  modified_base 35: mod_base = OTHER; note = 2'-O-methyladenosine
  modified_base 36: mod_base = OTHER; note = 2'-O-methyladenosine
  modified_base 37: mod_base = um
  modified_base 38: mod_base = OTHER; note = 2'-O-methyladenosine
  modified_base 39: mod_base = gm
  modified_base 40: mod_base = cm
  modified_base 68: mod_base = OTHER; note = 2'-O-methyladenosine
  modified_base 69: mod_base = OTHER; note = 2'-O-methyladenosine
  modified_base 70: mod_base = cm
  modified_base 71: mod_base = um
  modified_base 72: mod_base = um
  modified_base 73: mod_base = gm
  modified_base 74: mod_base = OTHER; note = 2'-O-methyladenosine
  modified_base 75: mod_base = OTHER; note = 2'-O-methyladenosine
  modified_base 76: mod_base = OTHER; note = 2'-O-methyladenosine
  modified_base 77: mod_base = OTHER; note = 2'-O-methyladenosine
  modified_base 78: mod_base = OTHER; note = 2'-O-methyladenosine
  modified_base 79: mod_base = gm
  modified_base 80: mod_base = um
  modified_base 81: mod_base = gm
  modified_base 82: mod_base = gm
  modified_base 83: mod_base = cm
  modified_base 84: mod_base = OTHER; note = 2'-O-methyladenosine
  modified_base 85: mod_base = cm
  modified_base 86: mod_base = cm
  modified_base 87: mod_base = gm
  modified_base 88: mod_base = OTHER; note = 2'-O-methyladenosine
  modified_base 89: mod_base = gm
  modified_base 90: mod_base = um
  modified_base 91: mod_base = cm
  modified_base 92: mod_base = gm
  modified_base 93: mod_base = gm
  modified_base 94: mod_base = um
  modified_base 95: mod_base = gm
  modified_base 96: mod_base = cm
  modified_base 99: mod_base = OTHER; note = 2' fluoro modified base
  modified_base 102: mod_base = OTHER; note = 2' fluoro modified base
  modified_base 105: mod_base = OTHER; note = 2' fluoro modified base
  modified_base 108: mod_base = OTHER; note = 2' fluoro modified base
  modified_base 112: mod_base = OTHER; note = 2' fluoro modified base
  modified_base 114: mod_base = OTHER; note = 2' fluoro modified base
  modified_base 116: mod_base = OTHER; note = 2' fluoro modified base
  modified_base 118: mod_base = OTHER; note = 2' fluoro modified base
  modified_base 119: mod_base = um
  modified_base 120: mod_base = OTHER; note = Phosphorothioate (PS) linkage
  modified_base 120: mod_base = um
  modified_base 121: mod_base = OTHER; note = Phosphorothioate (PS) linkage
  modified_base 121: mod_base = um
  modified_base 122: mod_base = OTHER; note = Phosphorothioate (PS) linkage
  modified_base 122: mod_base = um
  source 1..122: mol_type = other RNA

SEQ ID NO: 1101 - RNA, 122 nt, synthetic construct; identical to SEQ ID NO: 37
  modified_base 1: mod_base = um
  modified_base 2: mod_base = OTHER; note = Phosphorothioate (PS) linkage
  modified_base 2: mod_base = um
  modified_base 3: mod_base = OTHER; note = Phosphorothioate (PS) linkage
  modified_base 3: mod_base = gm
  modified_base 4: mod_base = OTHER; note = Phosphorothioate (PS) linkage
  modified_base 29: mod_base = gm
  modified_base 30: mod_base = cm
  modified_base 31: mod_base = um
  modified_base 32: mod_base = OTHER; note = 2'-O-methyladenosine
  modified_base 33: mod_base = gm
  modified_base 34: mod_base = OTHER; note = 2'-O-methyladenosine
  modified_base 35: mod_base = OTHER; note = 2'-O-methyladenosine
  modified_base 36: mod_base = OTHER; note = 2'-O-methyladenosine
  modified_base 37: mod_base = um
  modified_base 38: mod_base = OTHER; note = 2'-O-methyladenosine
  modified_base 39: mod_base = gm
  modified_base 40: mod_base = cm
  modified_base 68: mod_base = OTHER; note = 2'-O-methyladenosine
  modified_base 69: mod_base = OTHER; note = 2'-O-methyladenosine
  modified_base 70: mod_base = cm
  modified_base 71: mod_base = um
  modified_base 72: mod_base = um
  modified_base 73: mod_base = gm
  modified_base 74: mod_base = OTHER; note = 2'-O-methyladenosine
  modified_base 75: mod_base = OTHER; note = 2'-O-methyladenosine
  modified_base 76: mod_base = OTHER; note = 2'-O-methyladenosine
  modified_base 77: mod_base = OTHER; note = 2'-O-methyladenosine
  modified_base 78: mod_base = OTHER; note = 2'-O-methyladenosine
  modified_base 79: mod_base = gm
  modified_base 80: mod_base = um
  modified_base 81: mod_base = gm
  modified_base 82: mod_base = gm
  modified_base 83: mod_base = cm
  modified_base 84: mod_base = OTHER; note = 2'-O-methyladenosine
  modified_base 85: mod_base = cm
  modified_base 86: mod_base = cm
  modified_base 87: mod_base = gm
  modified_base 88: mod_base = OTHER; note = 2'-O-methyladenosine
  modified_base 89: mod_base = gm
  modified_base 90: mod_base = um
  modified_base 91: mod_base = cm
  modified_base 92: mod_base = gm
  modified_base 93: mod_base = gm
  modified_base 94: mod_base = um
  modified_base 95: mod_base = gm
  modified_base 96: mod_base = cm
  modified_base 98: mod_base = OTHER; note = 2' fluoro modified base
  modified_base 101: mod_base = OTHER; note = 2' fluoro modified base
  modified_base 104: mod_base = OTHER; note = 2' fluoro modified base
  modified_base 107: mod_base = OTHER; note = 2' fluoro modified base
  modified_base 110: mod_base = OTHER; note = 2' fluoro modified base
  modified_base 112: mod_base = OTHER; note = 2' fluoro modified base
  modified_base 114: mod_base = OTHER; note = 2' fluoro modified base
  modified_base 116: mod_base = OTHER; note = 2' fluoro modified base
  modified_base 118: mod_base = OTHER; note = 2' fluoro modified base
  modified_base 119: mod_base = um
  modified_base 120: mod_base = OTHER; note = Phosphorothioate (PS) linkage
  modified_base 120: mod_base = um
  modified_base 121: mod_base = OTHER; note = Phosphorothioate (PS) linkage
  modified_base 121: mod_base = um
  modified_base 122: mod_base = OTHER; note = Phosphorothioate (PS) linkage
  modified_base 122: mod_base = um
  source 1..122: mol_type = other RNA

SEQ ID NO: 1102 - RNA, 122 nt, synthetic construct; identical to SEQ ID NO: 37
  modified_base 1: mod_base = um
  modified_base 2: mod_base = OTHER; note = Phosphorothioate (PS) linkage
  modified_base 2: mod_base = um
  modified_base 3: mod_base = OTHER; note = Phosphorothioate (PS) linkage
  modified_base 3: mod_base = gm
  modified_base 4: mod_base = OTHER; note = Phosphorothioate (PS) linkage
  modified_base 29: mod_base = gm
  modified_base 30: mod_base = cm
  modified_base 31: mod_base = um
  modified_base 32: mod_base = OTHER; note = 2'-O-methyladenosine
  modified_base 33: mod_base = gm
  modified_base 34: mod_base = OTHER; note = 2'-O-methyladenosine
  modified_base 35: mod_base = OTHER; note = 2'-O-methyladenosine
  modified_base 36: mod_base = OTHER; note = 2'-O-methyladenosine
  modified_base 37: mod_base = um
  modified_base 38: mod_base = OTHER; note = 2'-O-methyladenosine
  modified_base 39: mod_base = gm
  modified_base 40: mod_base = cm
  modified_base 68: mod_base = OTHER; note = 2'-O-methyladenosine
  modified_base 69: mod_base = OTHER; note = 2'-O-methyladenosine
  modified_base 70: mod_base = cm
  modified_base 71: mod_base = um
  modified_base 72: mod_base = um
  modified_base 73: mod_base = gm
  modified_base 74: mod_base = OTHER; note = 2'-O-methyladenosine
  modified_base 75: mod_base = OTHER; note = 2'-O-methyladenosine
  modified_base 76: mod_base = OTHER; note = 2'-O-methyladenosine
  modified_base 77: mod_base = OTHER; note = 2'-O-methyladenosine
  modified_base 78: mod_base = OTHER; note = 2'-O-methyladenosine
  modified_base 79: mod_base = gm
  modified_base 80: mod_base = um
  modified_base 81: mod_base = gm
  modified_base 82: mod_base = gm
  modified_base 83: mod_base = cm
  modified_base 84: mod_base = OTHER; note = 2'-O-methyladenosine
  modified_base 85: mod_base = cm
  modified_base 86: mod_base = cm
  modified_base 87: mod_base = gm
  modified_base 88: mod_base = OTHER; note = 2'-O-methyladenosine
  modified_base 89: mod_base = gm
  modified_base 90: mod_base = um
  modified_base 91: mod_base = cm
  modified_base 92: mod_base = gm
  modified_base 93: mod_base = gm
  modified_base 94: mod_base = um
  modified_base 95: mod_base = gm
  modified_base 96: mod_base = cm
  modified_base 97: mod_base = OTHER; note = 2' fluoro modified base
  modified_base 100: mod_base = OTHER; note = 2' fluoro modified base
  modified_base 103: mod_base = OTHER; note = 2' fluoro modified base
  modified_base 106: mod_base = OTHER; note = 2' fluoro modified base
  modified_base 109: mod_base = OTHER; note = 2' fluoro modified base
  modified_base 112: mod_base = OTHER; note = 2' fluoro modified base
  modified_base 114: mod_base = OTHER; note = 2' fluoro modified base
  modified_base 116: mod_base = OTHER; note = 2' fluoro modified base
  modified_base 118: mod_base = OTHER; note = 2' fluoro modified base
  modified_base 119: mod_base = um
  modified_base 120: mod_base = OTHER; note = Phosphorothioate (PS) linkage
  modified_base 120: mod_base = um
  modified_base 121: mod_base = OTHER; note = Phosphorothioate (PS) linkage
  modified_base 121: mod_base = um
  modified_base 122: mod_base = OTHER; note = Phosphorothioate (PS) linkage
  modified_base 122: mod_base = um
  source 1..122: mol_type = other RNA

SEQ ID NO: 1103 - RNA, 122 nt, synthetic construct; identical to SEQ ID NO: 37
  modified_base 1: mod_base = um
  modified_base 2: mod_base = OTHER; note = Phosphorothioate (PS) linkage
  modified_base 2: mod_base = um
  modified_base 3: mod_base = OTHER; note = Phosphorothioate (PS) linkage
  modified_base 3: mod_base = gm
  modified_base 4: mod_base = OTHER; note = Phosphorothioate (PS) linkage
  modified_base 29: mod_base = gm
  modified_base 30: mod_base = cm
  modified_base 31: mod_base = um
  modified_base 32: mod_base = OTHER; note = 2'-O-methyladenosine
  modified_base 33: mod_base = gm
  modified_base 34: mod_base = OTHER; note = 2'-O-methyladenosine
  modified_base 35: mod_base = OTHER; note = 2'-O-methyladenosine
  modified_base 36: mod_base = OTHER; note = 2'-O-methyladenosine
  modified_base 37: mod_base = um
  modified_base 38: mod_base = OTHER; note = 2'-O-methyladenosine
  modified_base 39: mod_base = gm
  modified_base 40: mod_base = cm
  modified_base 68: mod_base = OTHER; note = 2'-O-methyladenosine
  modified_base 69: mod_base = OTHER; note = 2'-O-methyladenosine
  modified_base 70: mod_base = cm
  modified_base 71: mod_base = um
  modified_base 72: mod_base = um
  modified_base 73: mod_base = gm
  modified_base 74: mod_base = OTHER; note = 2'-O-methyladenosine
  modified_base 75: mod_base = OTHER; note = 2'-O-methyladenosine
  modified_base 76: mod_base = OTHER; note = 2'-O-methyladenosine
  modified_base 77: mod_base = OTHER; note = 2'-O-methyladenosine
  modified_base 78: mod_base = OTHER; note = 2'-O-methyladenosine
  modified_base 79: mod_base = gm
  modified_base 80: mod_base = um
  modified_base 81: mod_base = gm
  modified_base 82: mod_base = gm
  modified_base 83: mod_base = cm
  modified_base 84: mod_base = OTHER; note = 2'-O-methyladenosine
  modified_base 85: mod_base = cm
  modified_base 86: mod_base = cm
  modified_base 87: mod_base = gm
  modified_base 88: mod_base = OTHER; note = 2'-O-methyladenosine
  modified_base 89: mod_base = gm
  modified_base 90: mod_base = um
  modified_base 91: mod_base = cm
  modified_base 92: mod_base = gm
  modified_base 93: mod_base = gm
  modified_base 94: mod_base = um
  modified_base 95: mod_base = gm
  modified_base 96: mod_base = cm
  modified_base 111: mod_base = OTHER; note = 2' fluoro modified base
  modified_base 113: mod_base = OTHER; note = 2' fluoro modified base
  modified_base 115: mod_base = OTHER; note = 2' fluoro modified base
  modified_base 117: mod_base = OTHER; note = 2' fluoro modified base
  modified_base 119: mod_base = um
  modified_base 120: mod_base = OTHER; note = Phosphorothioate (PS) linkage
  modified_base 120: mod_base = um
  modified_base 121: mod_base = OTHER; note = Phosphorothioate (PS) linkage
  modified_base 121: mod_base = um
  modified_base 122: mod_base = OTHER; note = Phosphorothioate (PS) linkage
  modified_base 122: mod_base = um
  source 1..122: mol_type = other RNA

SEQ ID NO: 1104 - RNA, 122 nt, synthetic construct; identical to SEQ ID NO: 37
  modified_base 1: mod_base = um
  modified_base 2: mod_base = OTHER; note = Phosphorothioate (PS) linkage
  modified_base 2: mod_base = um
  modified_base 3: mod_base = OTHER; note = Phosphorothioate (PS) linkage
  modified_base 3: mod_base = gm
  modified_base 4: mod_base = OTHER; note = Phosphorothioate (PS) linkage
  modified_base 29: mod_base = gm
  modified_base 30: mod_base = cm
  modified_base 31: mod_base = um
  modified_base 32: mod_base = OTHER; note = 2'-O-methyladenosine
  modified_base 33: mod_base = gm
  modified_base 34: mod_base = OTHER; note = 2'-O-methyladenosine
  modified_base 35: mod_base = OTHER; note = 2'-O-methyladenosine
  modified_base 36: mod_base = OTHER; note = 2'-O-methyladenosine
  modified_base 37: mod_base = um
  modified_base 38: mod_base = OTHER; note = 2'-O-methyladenosine
  modified_base 39: mod_base = gm
  modified_base 40: mod_base = cm
  modified_base 68: mod_base = OTHER; note = 2'-O-methyladenosine
  modified_base 69: mod_base = OTHER; note = 2'-O-methyladenosine
  modified_base 70: mod_base = cm
  modified_base 71: mod_base = um
  modified_base 72: mod_base = um
  modified_base 73: mod_base = gm
  modified_base 74: mod_base = OTHER; note = 2'-O-methyladenosine
  modified_base 75: mod_base = OTHER; note = 2'-O-methyladenosine
  modified_base 76: mod_base = OTHER; note = 2'-O-methyladenosine
  modified_base 77: mod_base = OTHER; note = 2'-O-methyladenosine
  modified_base 78: mod_base = OTHER; note = 2'-O-methyladenosine
  modified_base 79: mod_base = gm
  modified_base 80: mod_base = um
  modified_base 81: mod_base = gm
  modified_base 82: mod_base = gm
  modified_base 83: mod_base = cm
  modified_base 84: mod_base = OTHER; note = 2'-O-methyladenosine
  modified_base 85: mod_base = cm
  modified_base 86: mod_base = cm
  modified_base 87: mod_base = gm
  modified_base 88: mod_base = OTHER; note = 2'-O-methyladenosine
  modified_base 89: mod_base = gm
  modified_base 90: mod_base = um
  modified_base 91: mod_base = cm
  modified_base 92: mod_base = gm
  modified_base 93: mod_base = gm
  modified_base 94: mod_base = um
  modified_base 95: mod_base = gm
  modified_base 96: mod_base = cm
  modified_base 99: mod_base = OTHER; note = 2' fluoro modified base
  modified_base 102: mod_base = OTHER; note = 2' fluoro modified base
  modified_base 105: mod_base = OTHER; note = 2' fluoro modified base
  modified_base 108: mod_base = OTHER; note = 2' fluoro modified base
  modified_base 111: mod_base = OTHER; note = 2' fluoro modified base
  modified_base 113: mod_base = OTHER; note = 2' fluoro modified base
  modified_base 115: mod_base = OTHER; note = 2' fluoro modified base
  modified_base 117: mod_base = OTHER; note = 2' fluoro modified base
  modified_base 119: mod_base = um
  modified_base 120: mod_base = OTHER; note = Phosphorothioate (PS) linkage
  modified_base 120: mod_base = um
  modified_base 121: mod_base = OTHER; note = Phosphorothioate (PS) linkage
  modified_base 121: mod_base = um
  modified_base 122: mod_base = OTHER; note = Phosphorothioate (PS) linkage
  modified_base 122: mod_base = um
  source 1..122: mol_type = other RNA

SEQ ID NO: 1105 - RNA, 122 nt, synthetic construct; identical to SEQ ID NO: 37
  modified_base 1: mod_base = um
  modified_base 2: mod_base = OTHER; note = Phosphorothioate (PS) linkage
  modified_base 2: mod_base = um
  modified_base 3: mod_base = OTHER; note = Phosphorothioate (PS) linkage
  modified_base 3: mod_base = gm
  modified_base 4: mod_base = OTHER; note = Phosphorothioate (PS) linkage
  modified_base 29: mod_base = gm
  modified_base 30: mod_base = cm
  modified_base 31: mod_base = um
  modified_base 32: mod_base = OTHER; note = 2'-O-methyladenosine
  modified_base 33: mod_base = gm
  modified_base 34: mod_base = OTHER; note = 2'-O-methyladenosine
  modified_base 35: mod_base = OTHER; note = 2'-O-methyladenosine
  modified_base 36: mod_base = OTHER; note = 2'-O-methyladenosine
  modified_base 37: mod_base = um
  modified_base 38: mod_base = OTHER; note = 2'-O-methyladenosine
  modified_base 39: mod_base = gm
  modified_base 40: mod_base = cm
  modified_base 68: mod_base = OTHER; note = 2'-O-methyladenosine
  modified_base 69: mod_base = OTHER; note = 2'-O-methyladenosine
  modified_base 70: mod_base = cm
  modified_base 71: mod_base = um
  modified_base 72: mod_base = um
  modified_base 73: mod_base = gm
  modified_base 74: mod_base = OTHER; note = 2'-O-methyladenosine
  modified_base 75: mod_base = OTHER; note = 2'-O-methyladenosine
  modified_base 76: mod_base = OTHER; note = 2'-O-methyladenosine
  modified_base 77: mod_base = OTHER; note = 2'-O-methyladenosine
  modified_base 78: mod_base = OTHER; note = 2'-O-methyladenosine
  modified_base 79: mod_base = gm
  modified_base 80: mod_base = um
  modified_base 81: mod_base = gm
  modified_base 82: mod_base = gm
  modified_base 83: mod_base = cm
  modified_base 84: mod_base = OTHER; note = 2'-O-methyladenosine
  modified_base 85: mod_base = cm
  modified_base 86: mod_base = cm
  modified_base 87: mod_base = gm
  modified_base 88: mod_base = OTHER; note = 2'-O-methyladenosine
  modified_base 89: mod_base = gm
  modified_base 90: mod_base = um
  modified_base 91: mod_base = cm
  modified_base 92: mod_base = gm
  modified_base 93: mod_base = gm
  modified_base 94: mod_base = um
  modified_base 95: mod_base = gm
  modified_base 96: mod_base = cm
  modified_base 98: mod_base = OTHER; note = 2' fluoro modified base
  modified_base 101: mod_base = OTHER; note = 2' fluoro modified base
  modified_base 104: mod_base = OTHER; note = 2' fluoro modified base
  modified_base 107: mod_base = OTHER; note = 2' fluoro modified base
  modified_base 110: mod_base = OTHER; note = 2' fluoro modified base
  modified_base 111: mod_base = OTHER; note = 2' fluoro modified base
  modified_base 113: mod_base = OTHER; note = 2' fluoro modified base
  modified_base 115: mod_base = OTHER; note = 2' fluoro modified base
  modified_base 117: mod_base = OTHER; note = 2' fluoro modified base
  modified_base 119: mod_base = um
  modified_base 120: mod_base = OTHER; note = Phosphorothioate (PS) linkage
  modified_base 120: mod_base = um
  modified_base 121: mod_base = OTHER; note = Phosphorothioate (PS) linkage
  modified_base 121: mod_base = um
  modified_base 122: mod_base = OTHER; note = Phosphorothioate (PS) linkage
  modified_base 122: mod_base = um
  source 1..122: mol_type = other RNA

SEQ ID NO: 1106 - RNA, 122 nt, synthetic construct; identical to SEQ ID NO: 37
  modified_base 1: mod_base = um
  modified_base 2: mod_base = OTHER; note = Phosphorothioate (PS) linkage
  modified_base 2: mod_base = um
  modified_base 3: mod_base = OTHER; note = Phosphorothioate (PS) linkage
  modified_base 3: mod_base = gm
  modified_base 4: mod_base = OTHER; note = Phosphorothioate (PS) linkage
  modified_base 29: mod_base = gm
  modified_base 30: mod_base = cm
  modified_base 31: mod_base = um
  modified_base 32: mod_base = OTHER; note = 2'-O-methyladenosine
  modified_base 33: mod_base = gm
  modified_base 34: mod_base = OTHER; note = 2'-O-methyladenosine
  modified_base 35: mod_base = OTHER; note = 2'-O-methyladenosine
  modified_base 36: mod_base = OTHER; note = 2'-O-methyladenosine
  modified_base 37: mod_base = um
  modified_base 38: mod_base = OTHER; note = 2'-O-methyladenosine
  modified_base 39: mod_base = gm
  modified_base 40: mod_base = cm
  modified_base 68: mod_base = OTHER; note = 2'-O-methyladenosine
  modified_base 69: mod_base = OTHER; note = 2'-O-methyladenosine
  modified_base 70: mod_base = cm
  modified_base 71: mod_base = um
  modified_base 72: mod_base = um
  modified_base 73: mod_base = gm
  modified_base 74: mod_base = OTHER; note = 2'-O-methyladenosine
  modified_base 75: mod_base = OTHER; note = 2'-O-methyladenosine
  modified_base 76: mod_base = OTHER; note = 2'-O-methyladenosine
  modified_base 77: mod_base = OTHER; note = 2'-O-methyladenosine
  modified_base 78: mod_base = OTHER; note = 2'-O-methyladenosine
  modified_base 79: mod_base = gm
  modified_base 80: mod_base = um
  modified_base 81: mod_base = gm
  modified_base 82: mod_base = gm
  modified_base 83: mod_base = cm
  modified_base 84: mod_base = OTHER; note = 2'-O-methyladenosine
  modified_base 85: mod_base = cm
  modified_base 86: mod_base = cm
  modified_base 87: mod_base = gm
  modified_base 88: mod_base = OTHER; note = 2'-O-methyladenosine
  modified_base 89: mod_base = gm
  modified_base 90: mod_base = um
  modified_base 91: mod_base = cm
  modified_base 92: mod_base = gm
  modified_base 93: mod_base = gm
  modified_base 94: mod_base = um
  modified_base 95: mod_base = gm
  modified_base 96: mod_base = cm
  modified_base 97: mod_base = OTHER; note = 2' fluoro modified base
  modified_base 100: mod_base = OTHER; note = 2' fluoro modified base
  modified_base 103: mod_base = OTHER; note = 2' fluoro modified base
  modified_base 106: mod_base = OTHER; note = 2' fluoro modified base
  modified_base 109: mod_base = OTHER; note = 2' fluoro modified base
  modified_base 111: mod_base = OTHER; note = 2' fluoro modified base
  modified_base 113: mod_base = OTHER; note = 2' fluoro modified base
  modified_base 115: mod_base = OTHER; note = 2' fluoro modified base
  modified_base 117: mod_base = OTHER; note = 2' fluoro modified base
  modified_base 119: mod_base = um
  modified_base 120: mod_base = OTHER; note = Phosphorothioate (PS) linkage
  modified_base 120: mod_base = um
  modified_base 121: mod_base = OTHER; note = Phosphorothioate (PS) linkage
  modified_base 121: mod_base = um
  modified_base 122: mod_base = OTHER; note = Phosphorothioate (PS) linkage
  modified_base 122: mod_base = um
  source 1..122: mol_type = other RNA

SEQ ID NO: 1107 - RNA, 122 nt, synthetic construct; identical to SEQ ID NO: 37
  modified_base 1: mod_base = um
  modified_base 2: mod_base = OTHER; note = Phosphorothioate (PS) linkage
  modified_base 2: mod_base = um
  modified_base 3: mod_base = OTHER; note = Phosphorothioate (PS) linkage
  modified_base 3: mod_base = gm
  modified_base 4: mod_base = OTHER; note = Phosphorothioate (PS) linkage
  modified_base 29: mod_base = gm
  modified_base 30: mod_base = cm
  modified_base 31: mod_base = um
  modified_base 32: mod_base = OTHER; note = 2'-O-methyladenosine
  modified_base 33: mod_base = gm
  modified_base 34: mod_base = OTHER; note = 2'-O-methyladenosine
  modified_base 35: mod_base = OTHER; note = 2'-O-methyladenosine
  modified_base 36: mod_base = OTHER; note = 2'-O-methyladenosine
  modified_base 37: mod_base = um
  modified_base 38: mod_base = OTHER; note = 2'-O-methyladenosine
  modified_base 39: mod_base = gm
  modified_base 40: mod_base = cm
  modified_base 68: mod_base = OTHER; note = 2'-O-methyladenosine
  modified_base 69: mod_base = OTHER; note = 2'-O-methyladenosine
  modified_base 70: mod_base = cm
  modified_base 71: mod_base = um
  modified_base 72: mod_base = um
  modified_base 73: mod_base = gm
  modified_base 74: mod_base = OTHER; note = 2'-O-methyladenosine
  modified_base 75: mod_base = OTHER; note = 2'-O-methyladenosine
  modified_base 76: mod_base = OTHER; note = 2'-O-methyladenosine
  modified_base 77: mod_base = OTHER; note = 2'-O-methyladenosine
  modified_base 78: mod_base = OTHER; note = 2'-O-methyladenosine
  modified_base 79: mod_base = gm
  modified_base 80: mod_base = um
  modified_base 81: mod_base = gm
  modified_base 82: mod_base = gm
  modified_base 83: mod_base = cm
  modified_base 84: mod_base = OTHER; note = 2'-O-methyladenosine
  modified_base 85: mod_base = cm
  modified_base 86: mod_base = cm
  modified_base 87: mod_base = gm
  modified_base 88: mod_base = OTHER; note = 2'-O-methyladenosine
  modified_base 89: mod_base = gm
  modified_base 90: mod_base = um
  modified_base 91: mod_base = cm
  modified_base 92: mod_base = gm
  modified_base 93: mod_base = gm
  modified_base 94: mod_base = um
  modified_base 95: mod_base = gm
  modified_base 96: mod_base = cm
  modified_base 99: mod_base = OTHER; note = 2' fluoro modified base
  modified_base 102: mod_base = OTHER; note = 2' fluoro modified base
  modified_base 105: mod_base = OTHER; note = 2' fluoro modified base
  modified_base 108: mod_base = OTHER; note = 2' fluoro modified base
  modified_base 112: mod_base = gm
  modified_base 114: mod_base = gm
  modified_base 116: mod_base = gm
  modified_base 118: mod_base = cm
  modified_base 119: mod_base = um
  modified_base 120: mod_base = OTHER; note = Phosphorothioate (PS) linkage
  modified_base 120: mod_base = um
  modified_base 121: mod_base = OTHER; note = Phosphorothioate (PS) linkage
  modified_base 121: mod_base = um
  modified_base 122: mod_base = OTHER; note = Phosphorothioate (PS) linkage
  modified_base 122: mod_base = um
  source 1..122: mol_type = other RNA

SEQ ID NO: 1108 - RNA, 122 nt, synthetic construct; identical to SEQ ID NO: 37
  modified_base 1: mod_base = um
  modified_base 2: mod_base = OTHER; note = Phosphorothioate (PS) linkage
  modified_base 2: mod_base = um
  modified_base 3: mod_base = OTHER; note = Phosphorothioate (PS) linkage
  modified_base 3: mod_base = gm
  modified_base 4: mod_base = OTHER; note = Phosphorothioate (PS) linkage
  modified_base 29: mod_base = gm
  modified_base 30: mod_base = cm
  modified_base 31: mod_base = um
  modified_base 32: mod_base = OTHER; note = 2'-O-methyladenosine
  modified_base 33: mod_base = gm
  modified_base 34: mod_base = OTHER; note = 2'-O-methyladenosine
  modified_base 35: mod_base = OTHER; note = 2'-O-methyladenosine
  modified_base 36: mod_base = OTHER; note = 2'-O-methyladenosine
  modified_base 37: mod_base = um
  modified_base 38: mod_base = OTHER; note = 2'-O-methyladenosine
  modified_base 39: mod_base = gm
  modified_base 40: mod_base = cm
  modified_base 68: mod_base = OTHER; note = 2'-O-methyladenosine
  modified_base 69: mod_base = OTHER; note = 2'-O-methyladenosine
  modified_base 70: mod_base = cm
  modified_base 71: mod_base = um
  modified_base 72: mod_base = um
  modified_base 73: mod_base = gm
  modified_base 74: mod_base = OTHER; note = 2'-O-methyladenosine
  modified_base 75: mod_base = OTHER; note = 2'-O-methyladenosine
  modified_base 76: mod_base = OTHER; note = 2'-O-methyladenosine
  modified_base 77: mod_base = OTHER; note = 2'-O-methyladenosine
  modified_base 78: mod_base = OTHER; note = 2'-O-methyladenosine
  modified_base 79: mod_base = gm
  modified_base 80: mod_base = um
  modified_base 81: mod_base = gm
  modified_base 82: mod_base = gm
  modified_base 83: mod_base = cm
  modified_base 84: mod_base = OTHER; note = 2'-O-methyladenosine
  modified_base 85: mod_base = cm
  modified_base 86: mod_base = cm
  modified_base 87: mod_base = gm
  modified_base 88: mod_base = OTHER; note = 2'-O-methyladenosine
  modified_base 89: mod_base = gm
  modified_base 90: mod_base = um
  modified_base 91: mod_base = cm
  modified_base 92: mod_base = gm
  modified_base 93: mod_base = gm
  modified_base 94: mod_base = um
  modified_base 95: mod_base = gm
  modified_base 96: mod_base = cm
  modified_base 98: mod_base = OTHER; note = 2' fluoro modified base
  modified_base 101: mod_base = OTHER; note = 2' fluoro modified base
  modified_base 104: mod_base = OTHER; note = 2' fluoro modified base
  modified_base 107: mod_base = OTHER; note = 2' fluoro modified base
  modified_base 110: mod_base = OTHER; note = 2' fluoro modified base
  modified_base 112: mod_base = gm
  modified_base 114: mod_base = gm
  modified_base 116: mod_base = gm
  modified_base 118: mod_base = cm
  modified_base 119: mod_base = um
  modified_base 120: mod_base = OTHER; note = Phosphorothioate (PS) linkage
  modified_base 120: mod_base = um
  modified_base 121: mod_base = OTHER; note = Phosphorothioate (PS) linkage
  modified_base 121: mod_base = um
  modified_base 122: mod_base = OTHER; note = Phosphorothioate (PS) linkage
  modified_base 122: mod_base = um
  source 1..122: mol_type = other RNA

SEQ ID NO: 1109 - RNA, 122 nt, synthetic construct; identical to SEQ ID NO: 37
  modified_base 1: mod_base = um
  modified_base 2: mod_base = OTHER; note = Phosphorothioate (PS) linkage
  modified_base 2: mod_base = um
  modified_base 3: mod_base = OTHER; note = Phosphorothioate (PS) linkage
  modified_base 3: mod_base = gm
  modified_base 4: mod_base = OTHER; note = Phosphorothioate (PS) linkage
  modified_base 29: mod_base = gm
  modified_base 30: mod_base = cm
  modified_base 31: mod_base = um
  modified_base 32: mod_base = OTHER; note = 2'-O-methyladenosine
  modified_base 33: mod_base = gm
  modified_base 34: mod_base = OTHER; note = 2'-O-methyladenosine
  modified_base 35: mod_base = OTHER; note = 2'-O-methyladenosine
  modified_base 36: mod_base = OTHER; note = 2'-O-methyladenosine
  modified_base 37: mod_base = um
  modified_base 38: mod_base = OTHER; note = 2'-O-methyladenosine
  modified_base 39: mod_base = gm
  modified_base 40: mod_base = cm
  modified_base 68: mod_base = OTHER; note = 2'-O-methyladenosine
  modified_base 69: mod_base = OTHER; note = 2'-O-methyladenosine
  modified_base 70: mod_base = cm
  modified_base 71: mod_base = um
  modified_base 72: mod_base = um
  modified_base 73: mod_base = gm
  modified_base 74: mod_base = OTHER; note = 2'-O-methyladenosine
  modified_base 75: mod_base = OTHER; note = 2'-O-methyladenosine
  modified_base 76: mod_base = OTHER; note = 2'-O-methyladenosine
  modified_base 77: mod_base = OTHER; note = 2'-O-methyladenosine
  modified_base 78: mod_base = OTHER; note = 2'-O-methyladenosine
  modified_base 79: mod_base = gm
  modified_base 80: mod_base = um
  modified_base 81: mod_base = gm
  modified_base 82: mod_base = gm
  modified_base 83: mod_base = cm
  modified_base 84: mod_base = OTHER; note = 2'-O-methyladenosine
  modified_base 85: mod_base = cm
  modified_base 86: mod_base = cm
  modified_base 87: mod_base = gm
  modified_base 88: mod_base = OTHER; note = 2'-O-methyladenosine
  modified_base 89: mod_base = gm
  modified_base 90: mod_base = um
  modified_base 91: mod_base = cm
  modified_base 92: mod_base = gm
  modified_base 93: mod_base = gm
  modified_base 94: mod_base = um
  modified_base 95: mod_base = gm
  modified_base 96: mod_base = cm
  modified_base 97: mod_base = OTHER; note = 2' fluoro modified base
  modified_base 100: mod_base = OTHER; note = 2' fluoro modified base
  modified_base 103: mod_base = OTHER; note = 2' fluoro modified base
  modified_base 106: mod_base = OTHER; note = 2' fluoro modified base
  modified_base 109: mod_base = OTHER; note = 2' fluoro modified base
  modified_base 112: mod_base = gm
  modified_base 114: mod_base = gm
  modified_base 116: mod_base = gm
  modified_base 118: mod_base = cm
  modified_base 119: mod_base = um
  modified_base 120: mod_base = OTHER; note = Phosphorothioate (PS) linkage
  modified_base 120: mod_base = um
  modified_base 121: mod_base = OTHER; note = Phosphorothioate (PS) linkage
  modified_base 121: mod_base = um
  modified_base 122: mod_base = OTHER; note = Phosphorothioate (PS) linkage
  modified_base 122: mod_base = um
  source 1..122: mol_type = other RNA

SEQ ID NO: 1110 - RNA, 122 nt, synthetic construct; identical to SEQ ID NO: 37
  modified_base 1: mod_base = um
  modified_base 2: mod_base = OTHER; note = Phosphorothioate (PS) linkage
  modified_base 2: mod_base = um
  modified_base 3: mod_base = OTHER; note = Phosphorothioate (PS) linkage
  modified_base 3: mod_base = gm
  modified_base 4: mod_base = OTHER; note = Phosphorothioate (PS) linkage
  modified_base 29: mod_base = gm
  modified_base 30: mod_base = cm
  modified_base 31: mod_base = um
  modified_base 32: mod_base = OTHER; note = 2'-O-methyladenosine
  modified_base 33: mod_base = gm
  modified_base 34: mod_base = OTHER; note = 2'-O-methyladenosine
  modified_base 35: mod_base = OTHER; note = 2'-O-methyladenosine
  modified_base 36: mod_base = OTHER; note = 2'-O-methyladenosine
  modified_base 37: mod_base = um
  modified_base 38: mod_base = OTHER; note = 2'-O-methyladenosine
  modified_base 39: mod_base = gm
  modified_base 40: mod_base = cm
  modified_base 68: mod_base = OTHER; note = 2'-O-methyladenosine
  modified_base 69: mod_base = OTHER; note = 2'-O-methyladenosine
  modified_base 70: mod_base = cm
  modified_base 71: mod_base = um
  modified_base 72: mod_base = um
  modified_base 73: mod_base = gm
  modified_base 74: mod_base = OTHER; note = 2'-O-methyladenosine
  modified_base 75: mod_base = OTHER; note = 2'-O-methyladenosine
  modified_base 76: mod_base = OTHER; note = 2'-O-methyladenosine
  modified_base 77: mod_base = OTHER; note = 2'-O-methyladenosine
  modified_base 78: mod_base = OTHER; note = 2'-O-methyladenosine
  modified_base 79: mod_base = gm
  modified_base 80: mod_base = um
  modified_base 81: mod_base = gm
  modified_base 82: mod_base = gm
  modified_base 83: mod_base = cm
  modified_base 84: mod_base = OTHER; note = 2'-O-methyladenosine
  modified_base 85: mod_base = cm
  modified_base 86: mod_base = cm
  modified_base 87: mod_base = gm
  modified_base 88: mod_base = OTHER; note = 2'-O-methyladenosine
  modified_base 89: mod_base = gm
  modified_base 90: mod_base = um
  modified_base 91: mod_base = cm
  modified_base 92: mod_base = gm
  modified_base 93: mod_base = gm
  modified_base 94: mod_base = um
  modified_base 95: mod_base = gm
  modified_base 96: mod_base = cm
  modified_base 111: mod_base = gm
  modified_base 113: mod_base = cm
  modified_base 115: mod_base = um
  modified_base 117: mod_base = gm
  modified_base 119: mod_base = um
  modified_base 120: mod_base = OTHER; note = Phosphorothioate (PS) linkage
  modified_base 120: mod_base = um
  modified_base 121: mod_base = OTHER; note = Phosphorothioate (PS) linkage
  modified_base 121: mod_base = um
  modified_base 122: mod_base = OTHER; note = Phosphorothioate (PS) linkage
  modified_base 122: mod_base = um
  source 1..122: mol_type = other RNA

SEQ ID NO: 1111 - RNA, 122 nt, synthetic construct; identical to SEQ ID NO: 37
  modified_base 1: mod_base = um
  modified_base 2: mod_base = OTHER; note = Phosphorothioate (PS) linkage
  modified_base 2: mod_base = um
  modified_base 3: mod_base = OTHER; note = Phosphorothioate (PS) linkage
  modified_base 3: mod_base = gm
  modified_base 4: mod_base = OTHER; note = Phosphorothioate (PS) linkage
  modified_base 29: mod_base = gm
  modified_base 30: mod_base = cm
  modified_base 31: mod_base = um
  modified_base 32: mod_base = OTHER; note = 2'-O-methyladenosine
  modified_base 33: mod_base = gm
  modified_base 34: mod_base = OTHER; note = 2'-O-methyladenosine
  modified_base 35: mod_base = OTHER; note = 2'-O-methyladenosine
  modified_base 36: mod_base = OTHER; note = 2'-O-methyladenosine
  modified_base 37: mod_base = um
  modified_base 38: mod_base = OTHER; note = 2'-O-methyladenosine
  modified_base 39: mod_base = gm
  modified_base 40: mod_base = cm
  modified_base 68: mod_base = OTHER; note = 2'-O-methyladenosine
  modified_base 69: mod_base = OTHER; note = 2'-O-methyladenosine
  modified_base 70: mod_base = cm
  modified_base 71: mod_base = um
  modified_base 72: mod_base = um
  modified_base 73: mod_base = gm
  modified_base 74: mod_base = OTHER; note = 2'-O-methyladenosine
  modified_base 75: mod_base = OTHER; note = 2'-O-methyladenosine
  modified_base 76: mod_base = OTHER; note = 2'-O-methyladenosine
  modified_base 77: mod_base = OTHER; note = 2'-O-methyladenosine
  modified_base 78: mod_base = OTHER; note = 2'-O-methyladenosine
  modified_base 79: mod_base = gm
  modified_base 80: mod_base = um
  modified_base 81: mod_base = gm
  modified_base 82: mod_base = gm
  modified_base 83: mod_base = cm
  modified_base 84: mod_base = OTHER; note = 2'-O-methyladenosine
  modified_base 85: mod_base = cm
  modified_base 86: mod_base = cm
  modified_base 87: mod_base = gm
  modified_base 88: mod_base = OTHER; note = 2'-O-methyladenosine
  modified_base 89: mod_base = gm
  modified_base 90: mod_base = um
  modified_base 91: mod_base = cm
  modified_base 92: mod_base = gm
  modified_base 93: mod_base = gm
  modified_base 94: mod_base = um
  modified_base 95: mod_base = gm
  modified_base 96: mod_base = cm
  modified_base 99: mod_base = OTHER; note = 2' fluoro modified base
  modified_base 102: mod_base = OTHER; note = 2' fluoro modified base
  modified_base 105: mod_base = OTHER; note = 2' fluoro modified base
  modified_base 108: mod_base = OTHER; note = 2' fluoro modified base
  modified_base 111: mod_base = gm
  modified_base 113: mod_base = cm
  modified_base 115: mod_base = um
  modified_base 117: mod_base = gm
  modified_base 119: mod_base = um
  modified_base 120: mod_base = OTHER; note = Phosphorothioate (PS) linkage
  modified_base 120: mod_base = um
  modified_base 121: mod_base = OTHER; note = Phosphorothioate (PS) linkage
  modified_base 121: mod_base = um
  modified_base 122: mod_base = OTHER; note = Phosphorothioate (PS) linkage
  modified_base 122: mod_base = um
  source 1..122: mol_type = other RNA

SEQ ID NO: 1112 - RNA, 122 nt, synthetic construct; identical to SEQ ID NO: 37
  modified_base 1: mod_base = um
  modified_base 2: mod_base = OTHER; note = Phosphorothioate (PS) linkage
  modified_base 2: mod_base = um
  modified_base 3: mod_base = OTHER; note = Phosphorothioate (PS) linkage
  modified_base 3: mod_base = gm
  modified_base 4: mod_base = OTHER; note = Phosphorothioate (PS) linkage
  modified_base 29: mod_base = gm
  modified_base 30: mod_base = cm
  modified_base 31: mod_base = um
  modified_base 32: mod_base = OTHER; note = 2'-O-methyladenosine
  modified_base 33: mod_base = gm
  modified_base 34: mod_base = OTHER; note = 2'-O-methyladenosine
  modified_base 35: mod_base = OTHER; note = 2'-O-methyladenosine
  modified_base 36: mod_base = OTHER; note = 2'-O-methyladenosine
  modified_base 37: mod_base = um
  modified_base 38: mod_base = OTHER; note = 2'-O-methyladenosine
  modified_base 39: mod_base = gm
  modified_base 40: mod_base = cm
  modified_base 68: mod_base = OTHER; note = 2'-O-methyladenosine
  modified_base 69: mod_base = OTHER; note = 2'-O-methyladenosine
  modified_base 70: mod_base = cm
  modified_base 71: mod_base = um
  modified_base 72: mod_base = um
  modified_base 73: mod_base = gm
  modified_base 74: mod_base = OTHER; note = 2'-O-methyladenosine
  modified_base 75: mod_base = OTHER; note = 2'-O-methyladenosine
  modified_base 76: mod_base = OTHER; note = 2'-O-methyladenosine
  modified_base 77: mod_base = OTHER; note = 2'-O-methyladenosine
  modified_base 78: mod_base = OTHER; note = 2'-O-methyladenosine
  modified_base 79: mod_base = gm
  modified_base 80: mod_base = um
  modified_base 81: mod_base = gm
  modified_base 82: mod_base = gm
  modified_base 83: mod_base = cm
  modified_base 84: mod_base = OTHER; note = 2'-O-methyladenosine
  modified_base 85: mod_base = cm
  modified_base 86: mod_base = cm
  modified_base 87: mod_base = gm
  modified_base 88: mod_base = OTHER; note = 2'-O-methyladenosine
  modified_base 89: mod_base = gm
  modified_base 90: mod_base = um
  modified_base 91: mod_base = cm
  modified_base 92: mod_base = gm
  modified_base 93: mod_base = gm
  modified_base 94: mod_base = um
  modified_base 95: mod_base = gm
  modified_base 96: mod_base = cm
  modified_base 98: mod_base = OTHER; note = 2' fluoro modified base
  modified_base 101: mod_base = OTHER; note = 2' fluoro modified base
  modified_base 104: mod_base = OTHER; note = 2' fluoro modified base
  modified_base 107: mod_base = OTHER; note = 2' fluoro modified base
  modified_base 110: mod_base = OTHER; note = 2' fluoro modified base
  modified_base 111: mod_base = gm
  modified_base 113: mod_base = cm
  modified_base 115: mod_base = um
  modified_base 117: mod_base = gm
  modified_base 119: mod_base = um
  modified_base 120: mod_base = OTHER; note = Phosphorothioate (PS) linkage
  modified_base 120: mod_base = um
  modified_base 121: mod_base = OTHER; note = Phosphorothioate (PS) linkage
  modified_base 121: mod_base = um
  modified_base 122: mod_base = OTHER; note = Phosphorothioate (PS) linkage
  modified_base 122: mod_base = um
  source 1..122: mol_type = other RNA

SEQ ID NO: 1113 - RNA, 122 nt, synthetic construct; identical to SEQ ID NO: 37
  modified_base 1: mod_base = um
  modified_base 2: mod_base = OTHER; note = Phosphorothioate (PS) linkage
  modified_base 2: mod_base = um
  modified_base 3: mod_base = OTHER; note = Phosphorothioate (PS) linkage
  modified_base 3: mod_base = gm
  modified_base 4: mod_base = OTHER; note = Phosphorothioate (PS) linkage
  modified_base 29: mod_base = gm
  modified_base 30: mod_base = cm
  modified_base 31: mod_base = um
  modified_base 32: mod_base = OTHER; note = 2'-O-methyladenosine
  modified_base 33: mod_base = gm
  modified_base 34: mod_base = OTHER; note = 2'-O-methyladenosine
  modified_base 35: mod_base = OTHER; note = 2'-O-methyladenosine
  modified_base 36: mod_base = OTHER; note = 2'-O-methyladenosine
  modified_base 37: mod_base = um
  modified_base 38: mod_base = OTHER; note = 2'-O-methyladenosine
  modified_base 39: mod_base = gm
  modified_base 40: mod_base = cm
  modified_base 68: mod_base = OTHER; note = 2'-O-methyladenosine
  modified_base 69: mod_base = OTHER; note = 2'-O-methyladenosine
  modified_base 70: mod_base = cm
  modified_base 71: mod_base = um
  modified_base 72: mod_base = um
  modified_base 73: mod_base = gm
  modified_base 74: mod_base = OTHER; note = 2'-O-methyladenosine
  modified_base 75: mod_base = OTHER; note = 2'-O-methyladenosine
  modified_base 76: mod_base = OTHER; note = 2'-O-methyladenosine
  modified_base 77: mod_base = OTHER; note = 2'-O-methyladenosine
  modified_base 78: mod_base = OTHER; note = 2'-O-methyladenosine
  modified_base 79: mod_base = gm
  modified_base 80: mod_base = um
  modified_base 81: mod_base = gm
  modified_base 82: mod_base = gm
  modified_base 83: mod_base = cm
  modified_base 84: mod_base = OTHER; note = 2'-O-methyladenosine
  modified_base 85: mod_base = cm
  modified_base 86: mod_base = cm
  modified_base 87: mod_base = gm
  modified_base 88: mod_base = OTHER; note = 2'-O-methyladenosine
  modified_base 89: mod_base = gm
  modified_base 90: mod_base = um
  modified_base 91: mod_base = cm
  modified_base 92: mod_base = gm
  modified_base 93: mod_base = gm
  modified_base 94: mod_base = um
  modified_base 95: mod_base = gm
  modified_base 96: mod_base = cm
  modified_base 97: mod_base = OTHER; note = 2' fluoro modified base
  modified_base 100: mod_base = OTHER; note = 2' fluoro modified base
  modified_base 103: mod_base = OTHER; note = 2' fluoro modified base
  modified_base 106: mod_base = OTHER; note = 2' fluoro modified base
  modified_base 109: mod_base = OTHER; note = 2' fluoro modified base
  modified_base 111: mod_base = gm
  modified_base 113: mod_base = cm
  modified_base 115: mod_base = um
  modified_base 117: mod_base = gm
  modified_base 119: mod_base = um
  modified_base 120: mod_base = OTHER; note = Phosphorothioate (PS) linkage
  modified_base 120: mod_base = um
  modified_base 121: mod_base = OTHER; note = Phosphorothioate (PS) linkage
  modified_base 121: mod_base = um
  modified_base 122: mod_base = OTHER; note = Phosphorothioate (PS) linkage
  modified_base 122: mod_base = um
  source 1..122: mol_type = other RNA

SEQ ID NO: 1114 - RNA, 122 nt, synthetic construct; identical to SEQ ID NO: 37
  modified_base 1: mod_base = um
  modified_base 2: mod_base = OTHER; note = Phosphorothioate (PS) linkage
  modified_base 2: mod_base = um
  modified_base 3: mod_base = OTHER; note = Phosphorothioate (PS) linkage
  modified_base 3: mod_base = gm
  modified_base 4: mod_base = OTHER; note = Phosphorothioate (PS) linkage
  modified_base 29: mod_base = gm
  modified_base 30: mod_base = cm
  modified_base 31: mod_base = um
  modified_base 32: mod_base = OTHER; note = 2'-O-methyladenosine
  modified_base 33: mod_base = gm
  modified_base 34: mod_base = OTHER; note = 2'-O-methyladenosine
  modified_base 35: mod_base = OTHER; note = 2'-O-methyladenosine
  modified_base 36: mod_base = OTHER; note = 2'-O-methyladenosine
  modified_base 37: mod_base = um
  modified_base 38: mod_base = OTHER; note = 2'-O-methyladenosine
  modified_base 39: mod_base = gm
  modified_base 40: mod_base = cm
  modified_base 68: mod_base = OTHER; note = 2'-O-methyladenosine
  modified_base 69: mod_base = OTHER; note = 2'-O-methyladenosine
  modified_base 70: mod_base = cm
  modified_base 71: mod_base = um
  modified_base 72: mod_base = um
  modified_base 73: mod_base = gm
  modified_base 74: mod_base = OTHER; note = 2'-O-methyladenosine
  modified_base 75: mod_base = OTHER; note = 2'-O-methyladenosine
  modified_base 76: mod_base = OTHER; note = 2'-O-methyladenosine
  modified_base 77: mod_base = OTHER; note = 2'-O-methyladenosine
  modified_base 78: mod_base = OTHER; note = 2'-O-methyladenosine
  modified_base 79: mod_base = gm
  modified_base 80: mod_base = um
  modified_base 81: mod_base = gm
  modified_base 82: mod_base = gm
  modified_base 83: mod_base = cm
  modified_base 84: mod_base = OTHER; note = 2'-O-methyladenosine
  modified_base 85: mod_base = cm
  modified_base 86: mod_base = cm
  modified_base 87: mod_base = gm
  modified_base 88: mod_base = OTHER; note = 2'-O-methyladenosine
  modified_base 89: mod_base = gm
  modified_base 90: mod_base = um
  modified_base 91: mod_base = cm
  modified_base 92: mod_base = gm
  modified_base 93: mod_base = gm
  modified_base 94: mod_base = um
  modified_base 95: mod_base = gm
  modified_base 96: mod_base = cm
  modified_base 100: mod_base = OTHER; note = 2' fluoro modified base
  modified_base 104: mod_base = OTHER; note = 2' fluoro modified base
  modified_base 108: mod_base = OTHER; note = 2' fluoro modified base
  modified_base 112: mod_base = OTHER; note = 2' fluoro modified base
  modified_base 116: mod_base = OTHER; note = 2' fluoro modified base
  modified_base 119: mod_base = um
  modified_base 120: mod_base = OTHER; note = Phosphorothioate (PS) linkage
  modified_base 120: mod_base = um
  modified_base 121: mod_base = OTHER; note = Phosphorothioate (PS) linkage
  modified_base 121: mod_base = um
  modified_base 122: mod_base = OTHER; note = Phosphorothioate (PS) linkage
  modified_base 122: mod_base = um
  source 1..122: mol_type = other RNA

SEQ ID NO: 1115 - RNA, 122 nt, synthetic construct; identical to SEQ ID NO: 37
  modified_base 1: mod_base = um
  modified_base 2: mod_base = OTHER; note = Phosphorothioate (PS) linkage
  modified_base 2: mod_base = um
  modified_base 3: mod_base = OTHER; note = Phosphorothioate (PS) linkage
  modified_base 3: mod_base = gm
  modified_base 4: mod_base = OTHER; note = Phosphorothioate (PS) linkage
  modified_base 29: mod_base = gm
  modified_base 30: mod_base = cm
  modified_base 31: mod_base = um
  modified_base 32: mod_base = OTHER; note = 2'-O-methyladenosine
  modified_base 33: mod_base = gm
  modified_base 34: mod_base = OTHER; note = 2'-O-methyladenosine
  modified_base 35: mod_base = OTHER; note = 2'-O-methyladenosine
  modified_base 36: mod_base = OTHER; note = 2'-O-methyladenosine
  modified_base 37: mod_base = um
  modified_base 38: mod_base = OTHER; note = 2'-O-methyladenosine
  modified_base 39: mod_base = gm
  modified_base 40: mod_base = cm
  modified_base 68: mod_base = OTHER; note = 2'-O-methyladenosine
  modified_base 69: mod_base = OTHER; note = 2'-O-methyladenosine
  modified_base 70: mod_base = cm
  modified_base 71: mod_base = um
  modified_base 72: mod_base = um
  modified_base 73: mod_base = gm
  modified_base 74: mod_base = OTHER; note = 2'-O-methyladenosine
  modified_base 75: mod_base = OTHER; note = 2'-O-methyladenosine
  modified_base 76: mod_base = OTHER; note = 2'-O-methyladenosine
  modified_base 77: mod_base = OTHER; note = 2'-O-methyladenosine
  modified_base 78: mod_base = OTHER; note = 2'-O-methyladenosine
  modified_base 79: mod_base = gm
  modified_base 80: mod_base = um
  modified_base 81: mod_base = gm
  modified_base 82: mod_base = gm
  modified_base 83: mod_base = cm
  modified_base 84: mod_base = OTHER; note = 2'-O-methyladenosine
  modified_base 85: mod_base = cm
  modified_base 86: mod_base = cm
  modified_base 87: mod_base = gm
  modified_base 88: mod_base = OTHER; note = 2'-O-methyladenosine
  modified_base 89: mod_base = gm
  modified_base 90: mod_base = um
  modified_base 91: mod_base = cm
  modified_base 92: mod_base = gm
  modified_base 93: mod_base = gm
  modified_base 94: mod_base = um
  modified_base 95: mod_base = gm
  modified_base 96: mod_base = cm
  modified_base 112: mod_base = OTHER; note = 2' fluoro modified base
  modified_base 116: mod_base = OTHER; note = 2' fluoro modified base
  modified_base 119: mod_base = um
  modified_base 120: mod_base = OTHER; note = Phosphorothioate (PS) linkage
  modified_base 120: mod_base = um
  modified_base 121: mod_base = OTHER; note = Phosphorothioate (PS) linkage
  modified_base 121: mod_base = um
  modified_base 122: mod_base = OTHER; note = Phosphorothioate (PS) linkage
  modified_base 122: mod_base = um
  source 1..122: mol_type = other RNA

SEQ ID NO: 1116 - RNA, 122 nt, synthetic construct; identical to SEQ ID NO: 37
  modified_base 1: mod_base = um
  modified_base 2: mod_base = OTHER; note = Phosphorothioate (PS) linkage
  modified_base 2: mod_base = um
  modified_base 3: mod_base = OTHER; note = Phosphorothioate (PS) linkage
  modified_base 3: mod_base = gm
  modified_base 4: mod_base = OTHER; note = Phosphorothioate (PS) linkage
  modified_base 29: mod_base = gm
  modified_base 30: mod_base = cm
  modified_base 31: mod_base = um
  modified_base 32: mod_base = OTHER; note = 2'-O-methyladenosine
  modified_base 33: mod_base = gm
  modified_base 34: mod_base = OTHER; note = 2'-O-methyladenosine
  modified_base 35: mod_base = OTHER; note = 2'-O-methyladenosine
  modified_base 36: mod_base = OTHER; note = 2'-O-methyladenosine
  modified_base 37: mod_base = um
  modified_base 38: mod_base = OTHER; note = 2'-O-methyladenosine
  modified_base 39: mod_base = gm
  modified_base 40: mod_base = cm
  modified_base 68: mod_base = OTHER; note = 2'-O-methyladenosine
  modified_base 69: mod_base = OTHER; note = 2'-O-methyladenosine
  modified_base 70: mod_base = cm
  modified_base 71: mod_base = um
  modified_base 72: mod_base = um
  modified_base 73: mod_base = gm
  modified_base 74: mod_base = OTHER; note = 2'-O-methyladenosine
  modified_base 75: mod_base = OTHER; note = 2'-O-methyladenosine
  modified_base 76: mod_base = OTHER; note = 2'-O-methyladenosine
  modified_base 77: mod_base = OTHER; note = 2'-O-methyladenosine
  modified_base 78: mod_base = OTHER; note = 2'-O-methyladenosine
  modified_base 79: mod_base = gm
  modified_base 80: mod_base = um
  modified_base 81: mod_base = gm
  modified_base 82: mod_base = gm
  modified_base 83: mod_base = cm
  modified_base 84: mod_base = OTHER; note = 2'-O-methyladenosine
  modified_base 85: mod_base = cm
  modified_base 86: mod_base = cm
  modified_base 87: mod_base = gm
  modified_base 88: mod_base = OTHER; note = 2'-O-methyladenosine
  modified_base 89: mod_base = gm
  modified_base 90: mod_base = um
  modified_base 91: mod_base = cm
  modified_base 92: mod_base = gm
  modified_base 93: mod_base = gm
  modified_base 94: mod_base = um
  modified_base 95: mod_base = gm
  modified_base 96: mod_base = cm
  modified_base 100: mod_base = OTHER; note = 2' fluoro modified base
  modified_base 104: mod_base = OTHER; note = 2' fluoro modified base
  modified_base 108: mod_base = OTHER; note = 2' fluoro modified base
  modified_base 119: mod_base = um
  modified_base 120: mod_base = OTHER; note = Phosphorothioate (PS) linkage
  modified_base 120: mod_base = um
  modified_base 121: mod_base = OTHER; note = Phosphorothioate (PS) linkage
  modified_base 121: mod_base = um
  modified_base 122: mod_base = OTHER; note = Phosphorothioate (PS) linkage
  modified_base 122: mod_base = um
  source 1..122: mol_type = other RNA

SEQ ID NO: 1117 - RNA, 122 nt, synthetic construct; identical to SEQ ID NO: 37
  modified_base 1: mod_base = um
  modified_base 2: mod_base = OTHER; note = Phosphorothioate (PS) linkage
  modified_base 2: mod_base = um
  modified_base 3: mod_base = OTHER; note = Phosphorothioate (PS) linkage
  modified_base 3: mod_base = gm
  modified_base 4: mod_base = OTHER; note = Phosphorothioate (PS) linkage
  modified_base 29: mod_base = gm
  modified_base 30: mod_base = cm
  modified_base 31: mod_base = um
  modified_base 32: mod_base = OTHER; note = 2'-O-methyladenosine
  modified_base 33: mod_base = gm
  modified_base 34: mod_base = OTHER; note = 2'-O-methyladenosine
  modified_base 35: mod_base = OTHER; note = 2'-O-methyladenosine
  modified_base 36: mod_base = OTHER; note = 2'-O-methyladenosine
  modified_base 37: mod_base = um
  modified_base 38: mod_base = OTHER; note = 2'-O-methyladenosine
  modified_base 39: mod_base = gm
  modified_base 40: mod_base = cm
  modified_base 68: mod_base = OTHER; note = 2'-O-methyladenosine
  modified_base 69: mod_base = OTHER; note = 2'-O-methyladenosine
  modified_base 70: mod_base = cm
  modified_base 71: mod_base = um
  modified_base 72: mod_base = um
  modified_base 73: mod_base = gm
  modified_base 74: mod_base = OTHER; note = 2'-O-methyladenosine
  modified_base 75: mod_base = OTHER; note = 2'-O-methyladenosine
  modified_base 76: mod_base = OTHER; note = 2'-O-methyladenosine
  modified_base 77: mod_base = OTHER; note = 2'-O-methyladenosine
  modified_base 78: mod_base = OTHER; note = 2'-O-methyladenosine
  modified_base 79: mod_base = gm
  modified_base 80: mod_base = um
  modified_base 81: mod_base = gm
  modified_base 82: mod_base = gm
  modified_base 83: mod_base = cm
  modified_base 84: mod_base = OTHER; note = 2'-O-methyladenosine
  modified_base 85: mod_base = cm
  modified_base 86: mod_base = cm
  modified_base 87: mod_base = gm
  modified_base 88: mod_base = OTHER; note = 2'-O-methyladenosine
  modified_base 89: mod_base = gm
  modified_base 90: mod_base = um
  modified_base 91: mod_base = cm
  modified_base 92: mod_base = gm
  modified_base 93: mod_base = gm
  modified_base 94: mod_base = um
  modified_base 95: mod_base = gm
  modified_base 96: mod_base = cm
  modified_base 101: mod_base = OTHER; note = 2' fluoro modified base
  modified_base 106: mod_base = OTHER; note = 2' fluoro modified base
  modified_base 111: mod_base = OTHER; note = 2' fluoro modified base
  modified_base 116: mod_base = OTHER; note = 2' fluoro modified base
  modified_base 119: mod_base = um
  modified_base 120: mod_base = OTHER; note = Phosphorothioate (PS) linkage
  modified_base 120: mod_base = um
  modified_base 121: mod_base = OTHER; note = Phosphorothioate (PS) linkage
  modified_base 121: mod_base = um
  modified_base 122: mod_base = OTHER; note = Phosphorothioate (PS) linkage
  modified_base 122: mod_base = um
  source 1..122: mol_type = other RNA

SEQ ID NO: 1118 - RNA, 122 nt, synthetic construct; identical to SEQ ID NO: 37
  modified_base 1: mod_base = um
  modified_base 2: mod_base = OTHER; note = Phosphorothioate (PS) linkage
  modified_base 2: mod_base = um
  modified_base 3: mod_base = OTHER; note = Phosphorothioate (PS) linkage
  modified_base 3: mod_base = gm
  modified_base 4: mod_base = OTHER; note = Phosphorothioate (PS) linkage
  modified_base 29: mod_base = gm
  modified_base 30: mod_base = cm
  modified_base 31: mod_base = um
  modified_base 32: mod_base = OTHER; note = 2'-O-methyladenosine
  modified_base 33: mod_base = gm
  modified_base 34: mod_base = OTHER; note = 2'-O-methyladenosine
  modified_base 35: mod_base = OTHER; note = 2'-O-methyladenosine
  modified_base 36: mod_base = OTHER; note = 2'-O-methyladenosine
  modified_base 37: mod_base = um
  modified_base 38: mod_base = OTHER; note = 2'-O-methyladenosine
  modified_base 39: mod_base = gm
  modified_base 40: mod_base = cm
  modified_base 68: mod_base = OTHER; note = 2'-O-methyladenosine
  modified_base 69: mod_base = OTHER; note = 2'-O-methyladenosine
  modified_base 70: mod_base = cm
  modified_base 71: mod_base = um
  modified_base 72: mod_base = um
  modified_base 73: mod_base = gm
  modified_base 74: mod_base = OTHER; note = 2'-O-methyladenosine
  modified_base 75: mod_base = OTHER; note = 2'-O-methyladenosine
  modified_base 76: mod_base = OTHER; note = 2'-O-methyladenosine
  modified_base 77: mod_base = OTHER; note = 2'-O-methyladenosine
  modified_base 78: mod_base = OTHER; note = 2'-O-methyladenosine
  modified_base 79: mod_base = gm
  modified_base 80: mod_base = um
  modified_base 81: mod_base = gm
  modified_base 82: mod_base = gm
  modified_base 83: mod_base = cm
  modified_base 84: mod_base = OTHER; note = 2'-O-methyladenosine
  modified_base 85: mod_base = cm
  modified_base 86: mod_base = cm
  modified_base 87: mod_base = gm
  modified_base 88: mod_base = OTHER; note = 2'-O-methyladenosine
  modified_base 89: mod_base = gm
  modified_base 90: mod_base = um
  modified_base 91: mod_base = cm
  modified_base 92: mod_base = gm
  modified_base 93: mod_base = gm
  modified_base 94: mod_base = um
  modified_base 95: mod_base = gm
  modified_base 96: mod_base = cm
  modified_base 111: mod_base = OTHER; note = 2' fluoro modified base
  modified_base 116: mod_base = OTHER; note = 2' fluoro modified base
  modified_base 119: mod_base = um
  modified_base 120: mod_base = OTHER; note = Phosphorothioate (PS) linkage
  modified_base 120: mod_base = um
  modified_base 121: mod_base = OTHER; note = Phosphorothioate (PS) linkage
  modified_base 121: mod_base = um
  modified_base 122: mod_base = OTHER; note = Phosphorothioate (PS) linkage
  modified_base 122: mod_base = um
  source 1..122: mol_type = other RNA

SEQ ID NO: 1119 - RNA, 122 nt, synthetic construct; identical to SEQ ID NO: 37
  modified_base 1: mod_base = um
  modified_base 2: mod_base = OTHER; note = Phosphorothioate (PS) linkage
  modified_base 2: mod_base = um
  modified_base 3: mod_base = OTHER; note = Phosphorothioate (PS) linkage
  modified_base 3: mod_base = gm
  modified_base 4: mod_base = OTHER; note = Phosphorothioate (PS) linkage
  modified_base 29: mod_base = gm
  modified_base 30: mod_base = cm
  modified_base 31: mod_base = um
  modified_base 32: mod_base = OTHER; note = 2'-O-methyladenosine
  modified_base 33: mod_base = gm
  modified_base 34: mod_base = OTHER; note = 2'-O-methyladenosine
  modified_base 35: mod_base = OTHER; note = 2'-O-methyladenosine
  modified_base 36: mod_base = OTHER; note = 2'-O-methyladenosine
  modified_base 37: mod_base = um
  modified_base 38: mod_base = OTHER; note = 2'-O-methyladenosine
  modified_base 39: mod_base = gm
  modified_base 40: mod_base = cm
  modified_base 68: mod_base = OTHER; note = 2'-O-methyladenosine
  modified_base 69: mod_base = OTHER; note = 2'-O-methyladenosine
  modified_base 70: mod_base = cm
  modified_base 71: mod_base = um
  modified_base 72: mod_base = um
  modified_base 73: mod_base = gm
  modified_base 74: mod_base = OTHER; note = 2'-O-methyladenosine
  modified_base 75: mod_base = OTHER; note = 2'-O-methyladenosine
  modified_base 76: mod_base = OTHER; note = 2'-O-methyladenosine
  modified_base 77: mod_base = OTHER; note = 2'-O-methyladenosine
  modified_base 78: mod_base = OTHER; note = 2'-O-methyladenosine
  modified_base 79: mod_base = gm
  modified_base 80: mod_base = um
  modified_base 81: mod_base = gm
  modified_base 82: mod_base = gm
  modified_base 83: mod_base = cm
  modified_base 84: mod_base = OTHER; note = 2'-O-methyladenosine
  modified_base 85: mod_base = cm
  modified_base 86: mod_base = cm
  modified_base 87: mod_base = gm
  modified_base 88: mod_base = OTHER; note = 2'-O-methyladenosine
  modified_base 89: mod_base = gm
  modified_base 90: mod_base = um
  modified_base 91: mod_base = cm
  modified_base 92: mod_base = gm
  modified_base 93: mod_base = gm
  modified_base 94: mod_base = um
  modified_base 95: mod_base = gm
  modified_base 96: mod_base = cm
  modified_base 101: mod_base = OTHER; note = 2' fluoro modified base
  modified_base 106: mod_base = OTHER; note = 2' fluoro modified base
  modified_base 119: mod_base = um
  modified_base 120: mod_base = OTHER; note = Phosphorothioate (PS) linkage
  modified_base 120: mod_base = um
  modified_base 121: mod_base = OTHER; note = Phosphorothioate (PS) linkage
  modified_base 121: mod_base = um
  modified_base 122: mod_base = OTHER; note = Phosphorothioate (PS) linkage
  modified_base 122: mod_base = um
  source 1..122: mol_type = other RNA

SEQ ID NO: 1120 - RNA, 122 nt, synthetic construct; identical to SEQ ID NO: 37
  source 1..122: mol_type = other RNA

SEQ ID NO: 1121 - RNA, 122 nt, synthetic construct; identical to SEQ ID NO: 37
  modified_base 1: mod_base = um
  modified_base 2: mod_base = OTHER; note = Phosphorothioate (PS) linkage
  modified_base 2: mod_base = um
  modified_base 3: mod_base = OTHER; note = Phosphorothioate (PS) linkage
  modified_base 3: mod_base = gm
  modified_base 4: mod_base = OTHER; note = Phosphorothioate (PS) linkage
  modified_base 119: mod_base = um
  modified_base 120: mod_base = OTHER; note = Phosphorothioate (PS) linkage
  modified_base 120: mod_base = um
  modified_base 121: mod_base = OTHER; note = Phosphorothioate (PS) linkage
  modified_base 121: mod_base = um
  modified_base 122: mod_base = OTHER; note = Phosphorothioate (PS) linkage
  modified_base 122: mod_base = um
  source 1..122: mol_type = other RNA

SEQ ID NO: 1122 - RNA, 122 nt, synthetic construct; identical to SEQ ID NO: 37
  modified_base 1: mod_base = um
  modified_base 2: mod_base = OTHER; note = Phosphorothioate (PS) linkage
  modified_base 2: mod_base = um
  modified_base 3: mod_base = OTHER; note = Phosphorothioate (PS) linkage
  modified_base 3: mod_base = gm
  modified_base 4: mod_base = OTHER; note = Phosphorothioate (PS) linkage
  modified_base 29: mod_base = gm
  modified_base 30: mod_base = cm
  modified_base 31: mod_base = um
  modified_base 32: mod_base = OTHER; note = 2'-O-methyladenosine
  modified_base 33: mod_base = gm
  modified_base 34: mod_base = OTHER; note = 2'-O-methyladenosine
  modified_base 35: mod_base = OTHER; note = 2'-O-methyladenosine
  modified_base 36: mod_base = OTHER; note = 2'-O-methyladenosine
  modified_base 37: mod_base = um
  modified_base 38: mod_base = OTHER; note = 2'-O-methyladenosine
  modified_base 39: mod_base = gm
  modified_base 40: mod_base = cm
  modified_base 68: mod_base = OTHER; note = 2'-O-methyladenosine
  modified_base 69: mod_base = OTHER; note = 2'-O-methyladenosine
  modified_base 70: mod_base = cm
  modified_base 71: mod_base = um
  modified_base 72: mod_base = um
  modified_base 73: mod_base = gm
  modified_base 74: mod_base = OTHER; note = 2'-O-methyladenosine
  modified_base 75: mod_base = OTHER; note = 2'-O-methyladenosine
  modified_base 76: mod_base = OTHER; note = 2'-O-methyladenosine
  modified_base 77: mod_base = OTHER; note = 2'-O-methyladenosine
  modified_base 78: mod_base = OTHER; note = 2'-O-methyladenosine
  modified_base 79: mod_base = gm
  modified_base 80: mod_base = um
  modified_base 81: mod_base = gm
  modified_base 82: mod_base = gm
  modified_base 83: mod_base = cm
  modified_base 84: mod_base = OTHER; note = 2'-O-methyladenosine
  modified_base 85: mod_base = cm
  modified_base 86: mod_base = cm
  modified_base 87: mod_base = gm
  modified_base 88: mod_base = OTHER; note = 2'-O-methyladenosine
  modified_base 89: mod_base = gm
  modified_base 90: mod_base = um
  modified_base 91: mod_base = cm
  modified_base 92: mod_base = gm
  modified_base 93: mod_base = gm
  modified_base 94: mod_base = um
  modified_base 95: mod_base = gm
  modified_base 96: mod_base = cm
  modified_base 99: mod_base = OTHER; note = 2' fluoro modified base
  modified_base 102: mod_base = OTHER; note = 2' fluoro modified base
  modified_base 105: mod_base = OTHER; note = 2' fluoro modified base
  modified_base 108: mod_base = OTHER; note = 2' fluoro modified base
  modified_base 111: mod_base = OTHER; note = 2' fluoro modified base
  modified_base 114: mod_base = OTHER; note = 2' fluoro modified base
  modified_base 117: mod_base = OTHER; note = 2' fluoro modified base
  modified_base 119: mod_base = um
  modified_base 120: mod_base = OTHER; note = Phosphorothioate (PS) linkage
  modified_base 121: mod_base = OTHER; note = Phosphorothioate (PS) linkage
  modified_base 122: mod_base = OTHER; note = Phosphorothioate (PS) linkage
  source 1..122: mol_type = other RNA

SEQ ID NO: 1123 - RNA, 122 nt, synthetic construct; identical to SEQ ID NO: 37
  modified_base 1: mod_base = um
  modified_base 2: mod_base = OTHER; note = Phosphorothioate (PS) linkage
  modified_base 2: mod_base = um
  modified_base 3: mod_base = OTHER; note = Phosphorothioate (PS) linkage
  modified_base 3: mod_base = gm
  modified_base 4: mod_base = OTHER; note = Phosphorothioate (PS) linkage
  modified_base 29: mod_base = gm
  modified_base 30: mod_base = cm
  modified_base 31: mod_base = um
  modified_base 32: mod_base = OTHER; note = 2'-O-methyladenosine
  modified_base 33: mod_base = gm
  modified_base 34: mod_base = OTHER; note = 2'-O-methyladenosine
  modified_base 35: mod_base = OTHER; note = 2'-O-methyladenosine
  modified_base 36: mod_base = OTHER; note = 2'-O-methyladenosine
  modified_base 37: mod_base = um
  modified_base 38: mod_base = OTHER; note = 2'-O-methyladenosine
  modified_base 39: mod_base = gm
  modified_base 40: mod_base = cm
  modified_base 68: mod_base = OTHER; note = 2'-O-methyladenosine
  modified_base 69: mod_base = OTHER; note = 2'-O-methyladenosine
  modified_base 70: mod_base = cm
  modified_base 71: mod_base = um
  modified_base 72: mod_base = um
  modified_base 73: mod_base = gm
  modified_base 74: mod_base = OTHER; note = 2'-O-methyladenosine
  modified_base 75: mod_base = OTHER; note = 2'-O-methyladenosine
  modified_base 76: mod_base = OTHER; note = 2'-O-methyladenosine
  modified_base 77: mod_base = OTHER; note = 2'-O-methyladenosine
  modified_base 78: mod_base = OTHER; note = 2'-O-methyladenosine
  modified_base 79: mod_base = gm
  modified_base 80: mod_base = um
  modified_base 81: mod_base = gm
  modified_base 82: mod_base = gm
  modified_base 83: mod_base = cm
  modified_base 84: mod_base = OTHER; note = 2'-O-methyladenosine
  modified_base 85: mod_base = cm
  modified_base 86: mod_base = cm
  modified_base 87: mod_base = gm
  modified_base 88: mod_base = OTHER; note = 2'-O-methyladenosine
  modified_base 89: mod_base = gm
  modified_base 90: mod_base = um
  modified_base 91: mod_base = cm
  modified_base 92: mod_base = gm
  modified_base 93: mod_base = gm
  modified_base 94: mod_base = um
  modified_base 95: mod_base = gm
  modified_base 96: mod_base = cm
  modified_base 99: mod_base = OTHER; note = 2' fluoro modified base
  modified_base 102: mod_base = OTHER; note = 2' fluoro modified base
  modified_base 105: mod_base = OTHER; note = 2' fluoro modified base
  modified_base 108: mod_base = OTHER; note = 2' fluoro modified base
  modified_base 111: mod_base = OTHER; note = 2' fluoro modified base
  modified_base 114: mod_base = OTHER; note = 2' fluoro modified base
  modified_base 117: mod_base = OTHER; note = 2' fluoro modified base
  modified_base 119: mod_base = um
  modified_base 120: mod_base = OTHER; note = Phosphorothioate (PS) linkage
  modified_base 120: mod_base = um
  modified_base 121: mod_base = OTHER; note = Phosphorothioate (PS) linkage
  modified_base 122: mod_base = OTHER; note = Phosphorothioate (PS) linkage
  source 1..122: mol_type = other RNA

SEQ ID NO: 1124 - RNA, 122 nt, synthetic construct; identical to SEQ ID NO: 37
  modified_base 1: mod_base = um
  modified_base 2: mod_base = OTHER; note = Phosphorothioate (PS) linkage
  modified_base 2: mod_base = um
  modified_base 3: mod_base = OTHER; note = Phosphorothioate (PS) linkage
  modified_base 3: mod_base = gm
  modified_base 4: mod_base = OTHER; note = Phosphorothioate (PS) linkage
  modified_base 29: mod_base = gm
  modified_base 30: mod_base = cm
  modified_base 31: mod_base = um
  modified_base 32: mod_base = OTHER; note = 2'-O-methyladenosine
  modified_base 33: mod_base = gm
  modified_base 34: mod_base = OTHER; note = 2'-O-methyladenosine
  modified_base 35: mod_base = OTHER; note = 2'-O-methyladenosine
  modified_base 36: mod_base = OTHER; note = 2'-O-methyladenosine
  modified_base 37: mod_base = um
  modified_base 38: mod_base = OTHER; note = 2'-O-methyladenosine
  modified_base 39: mod_base = gm
  modified_base 40: mod_base = cm
  modified_base 68: mod_base = OTHER; note = 2'-O-methyladenosine
  modified_base 69: mod_base = OTHER; note = 2'-O-methyladenosine
  modified_base 70: mod_base = cm
  modified_base 71: mod_base = um
  modified_base 72: mod_base = um
  modified_base 73: mod_base = gm
  modified_base 74: mod_base = OTHER; note = 2'-O-methyladenosine
  modified_base 75: mod_base = OTHER; note = 2'-O-methyladenosine
  modified_base 76: mod_base = OTHER; note = 2'-O-methyladenosine
  modified_base 77: mod_base = OTHER; note = 2'-O-methyladenosine
  modified_base 78: mod_base = OTHER; note = 2'-O-methyladenosine
  modified_base 79: mod_base = gm
  modified_base 80: mod_base = um
  modified_base 81: mod_base = gm
  modified_base 82: mod_base = gm
  modified_base 83: mod_base = cm
  modified_base 84: mod_base = OTHER; note = 2'-O-methyladenosine
  modified_base 85: mod_base = cm
  modified_base 86: mod_base = cm
  modified_base 87: mod_base = gm
  modified_base 88: mod_base = OTHER; note = 2'-O-methyladenosine
  modified_base 89: mod_base = gm
  modified_base 90: mod_base = um
  modified_base 91: mod_base = cm
  modified_base 92: mod_base = gm
  modified_base 93: mod_base = gm
  modified_base 94: mod_base = um
  modified_base 95: mod_base = gm
  modified_base 96: mod_base = cm
  modified_base 99: mod_base = OTHER; note = 2' fluoro modified base
  modified_base 102: mod_base = OTHER; note = 2' fluoro modified base
  modified_base 105: mod_base = OTHER; note = 2' fluoro modified base
  modified_base 108: mod_base = OTHER; note = 2' fluoro modified base
  modified_base 111: mod_base = OTHER; note = 2' fluoro modified base
  modified_base 114: mod_base = OTHER; note = 2' fluoro modified base
  modified_base 117: mod_base = OTHER; note = 2' fluoro modified base
  modified_base 119: mod_base = um
  modified_base 120: mod_base = OTHER; note = Phosphorothioate (PS) linkage
  modified_base 120: mod_base = um
  modified_base 121: mod_base = OTHER; note = Phosphorothioate (PS) linkage
  modified_base 121: mod_base = um
  modified_base 122: mod_base = OTHER; note = Phosphorothioate (PS) linkage
  source 1..122: mol_type = other RNA

SEQ ID NO: 1125 - RNA, 121 nt, synthetic construct
  modified_base 1: mod_base = um
  modified_base 2: mod_base = OTHER; note = Phosphorothioate (PS) linkage
  modified_base 2: mod_base = um
  modified_base 3: mod_base = OTHER; note = Phosphorothioate (PS) linkage
  modified_base 3: mod_base = gm
  modified_base 4: mod_base = OTHER; note = Phosphorothioate (PS) linkage
  modified_base 29: mod_base = gm
  modified_base 30: mod_base = cm
  modified_base 31: mod_base = um
  modified_base 32: mod_base = OTHER; note = 2'-O-methyladenosine
  modified_base 33: mod_base = gm
  modified_base 34: mod_base = OTHER; note = 2'-O-methyladenosine
  modified_base 35: mod_base = OTHER; note = 2'-O-methyladenosine
  modified_base 36: mod_base = OTHER; note = 2'-O-methyladenosine
  modified_base 37: mod_base = um
  modified_base 38: mod_base = OTHER; note = 2'-O-methyladenosine
  modified_base 39: mod_base = gm
  modified_base 40: mod_base = cm
  modified_base 68: mod_base = OTHER; note = 2'-O-methyladenosine
  modified_base 69: mod_base = OTHER; note = 2'-O-methyladenosine
  modified_base 70: mod_base = cm
  modified_base 71: mod_base = um
  modified_base 72: mod_base = um
  modified_base 73: mod_base = gm
  modified_base 74: mod_base = OTHER; note = 2'-O-methyladenosine
  modified_base 75: mod_base = OTHER; note = 2'-O-methyladenosine
  modified_base 76: mod_base = OTHER; note = 2'-O-methyladenosine
  modified_base 77: mod_base = OTHER; note = 2'-O-methyladenosine
  modified_base 78: mod_base = OTHER; note = 2'-O-methyladenosine
  modified_base 79: mod_base = gm
  modified_base 80: mod_base = um
  modified_base 81: mod_base = gm
  modified_base 82: mod_base = gm
  modified_base 83: mod_base = cm
  modified_base 84: mod_base = OTHER; note = 2'-O-methyladenosine
  modified_base 85: mod_base = cm
  modified_base 86: mod_base = cm
  modified_base 87: mod_base = gm
  modified_base 88: mod_base = OTHER; note = 2'-O-methyladenosine
  modified_base 89: mod_base = gm
  modified_base 90: mod_base = um
  modified_base 91: mod_base = cm
  modified_base 92: mod_base = gm
  modified_base 93: mod_base = gm
  modified_base 94: mod_base = um
  modified_base 95: mod_base = gm
  modified_base 96: mod_base = cm
  modified_base 99: mod_base = OTHER; note = 2' fluoro modified base
  modified_base 102: mod_base = OTHER; note = 2' fluoro modified base
  modified_base 105: mod_base = OTHER; note = 2' fluoro modified base
  modified_base 108: mod_base = OTHER; note = 2' fluoro modified base
  modified_base 111: mod_base = OTHER; note = 2' fluoro modified base
  modified_base 114: mod_base = OTHER; note = 2' fluoro modified base
  modified_base 117: mod_base = OTHER; note = 2' fluoro modified base
  modified_base 119: mod_base = um
  modified_base 120: mod_base = OTHER; note = Phosphorothioate (PS) linkage
  modified_base 120: mod_base = um
  modified_base 121: mod_base = OTHER; note = Phosphorothioate (PS) linkage
  modified_base 121: mod_base = um
  source 1..121: mol_type = other RNA
ttggtgactgccacgcccaagttttagagctagaaatagcaagttaaaataaggctagtccgttatcaacttgaaaaagtggcaccgagtcggtgcgtgaacaccccttgggcgtggcttt

SEQ ID NO: 1126 - RNA, 124 nt, synthetic construct
  modified_base 1: mod_base = um
  modified_base 2: mod_base = OTHER; note = Phosphorothioate (PS) linkage
  modified_base 2: mod_base = um
  modified_base 3: mod_base = OTHER; note = Phosphorothioate (PS) linkage
  modified_base 3: mod_base = gm
  modified_base 4: mod_base = OTHER; note = Phosphorothioate (PS) linkage
  modified_base 29: mod_base = gm
  modified_base 30: mod_base = cm
  modified_base 31: mod_base = um
  modified_base 32: mod_base = OTHER; note = 2'-O-methyladenosine
  modified_base 33: mod_base = gm
  modified_base 34: mod_base = OTHER; note = 2'-O-methyladenosine
  modified_base 35: mod_base = OTHER; note = 2'-O-methyladenosine
  modified_base 36: mod_base = OTHER; note = 2'-O-methyladenosine
  modified_base 37: mod_base = um
  modified_base 38: mod_base = OTHER; note = 2'-O-methyladenosine
  modified_base 39: mod_base = gm
  modified_base 40: mod_base = cm
  modified_base 68: mod_base = OTHER; note = 2'-O-methyladenosine
  modified_base 69: mod_base = OTHER; note = 2'-O-methyladenosine
  modified_base 70: mod_base = cm
  modified_base 71: mod_base = um
  modified_base 72: mod_base = um
  modified_base 73: mod_base = gm
  modified_base 74: mod_base = OTHER; note = 2'-O-methyladenosine
  modified_base 75: mod_base = OTHER; note = 2'-O-methyladenosine
  modified_base 76: mod_base = OTHER; note = 2'-O-methyladenosine
  modified_base 77: mod_base = OTHER; note = 2'-O-methyladenosine
  modified_base 78: mod_base = OTHER; note = 2'-O-methyladenosine
  modified_base 79: mod_base = gm
  modified_base 80: mod_base = um
  modified_base 81: mod_base = gm
  modified_base 82: mod_base = gm
  modified_base 83: mod_base = cm
  modified_base 84: mod_base = OTHER; note = 2'-O-methyladenosine
  modified_base 85: mod_base = cm
  modified_base 86: mod_base = cm
  modified_base 87: mod_base = gm
  modified_base 88: mod_base = OTHER; note = 2'-O-methyladenosine
  modified_base 89: mod_base = gm
  modified_base 90: mod_base = um
  modified_base 91: mod_base = cm
  modified_base 92: mod_base = gm
  modified_base 93: mod_base = gm
  modified_base 94: mod_base = um
  modified_base 95: mod_base = gm
  modified_base 96: mod_base = cm
  modified_base 99: mod_base = OTHER; note = 2' fluoro modified base
  modified_base 102: mod_base = OTHER; note = 2' fluoro modified base
  modified_base 105: mod_base = OTHER; note = 2' fluoro modified base
  modified_base 108: mod_base = OTHER; note = 2' fluoro modified base
  modified_base 111: mod_base = OTHER; note = 2' fluoro modified base
  modified_base 114: mod_base = OTHER; note = 2' fluoro modified base
  modified_base 117: mod_base = OTHER; note = 2' fluoro modified base
  modified_base 121: mod_base = OTHER; note = Phosphorothioate (PS) linkage
  modified_base 121: mod_base = um
  modified_base 122: mod_base = OTHER; note = Phosphorothioate (PS) linkage
  modified_base 122: mod_base = um
  modified_base 123: mod_base = OTHER; note = Phosphorothioate (PS) linkage
  modified_base 123: mod_base = um
  source 1..124: mol_type = other RNA
ttggtgactgccacgcccaagttttagagctagaaatagcaagttaaaataaggctagtccgttatcaacttgaaaaagtggcaccgagtcggtgcgtgaacaccccttgggcgtggctttttt

SEQ ID NO: 1127 - RNA, 124 nt, synthetic construct; identical to SEQ ID NO: 1126
  modified_base 1: mod_base = um
  modified_base 2: mod_base = OTHER; note = Phosphorothioate (PS) linkage
  modified_base 2: mod_base = um
  modified_base 3: mod_base = OTHER; note = Phosphorothioate (PS) linkage
  modified_base 3: mod_base = gm
  modified_base 4: mod_base = OTHER; note = Phosphorothioate (PS) linkage
  modified_base 29: mod_base = gm
  modified_base 30: mod_base = cm
  modified_base 31: mod_base = um
  modified_base 32: mod_base = OTHER; note = 2'-O-methyladenosine
  modified_base 33: mod_base = gm
  modified_base 34: mod_base = OTHER; note = 2'-O-methyladenosine
  modified_base 35: mod_base = OTHER; note = 2'-O-methyladenosine
  modified_base 36: mod_base = OTHER; note = 2'-O-methyladenosine
  modified_base 37: mod_base = um
  modified_base 38: mod_base = OTHER; note = 2'-O-methyladenosine
  modified_base 39: mod_base = gm
  modified_base 40: mod_base = cm
  modified_base 68: mod_base = OTHER; note = 2'-O-methyladenosine
  modified_base 69: mod_base = OTHER; note = 2'-O-methyladenosine
  modified_base 70: mod_base = cm
  modified_base 71: mod_base = um
  modified_base 72: mod_base = um
  modified_base 73: mod_base = gm
  modified_base 74: mod_base = OTHER; note = 2'-O-methyladenosine
  modified_base 75: mod_base = OTHER; note = 2'-O-methyladenosine
  modified_base 76: mod_base = OTHER; note = 2'-O-methyladenosine
  modified_base 77: mod_base = OTHER; note = 2'-O-methyladenosine
  modified_base 78: mod_base = OTHER; note = 2'-O-methyladenosine
  modified_base 79: mod_base = gm
  modified_base 80: mod_base = um
  modified_base 81: mod_base = gm
  modified_base 82: mod_base = gm
  modified_base 83: mod_base = cm
  modified_base 84: mod_base = OTHER; note = 2'-O-methyladenosine
  modified_base 85: mod_base = cm
  modified_base 86: mod_base = cm
  modified_base 87: mod_base = gm
  modified_base 88: mod_base = OTHER; note = 2'-O-methyladenosine
  modified_base 89: mod_base = gm
  modified_base 90: mod_base = um
  modified_base 91: mod_base = cm
  modified_base 92: mod_base = gm
  modified_base 93: mod_base = gm
  modified_base 94: mod_base = um
  modified_base 95: mod_base = gm
  modified_base 96: mod_base = cm
  modified_base 99: mod_base = OTHER; note = 2' fluoro modified base
  modified_base 102: mod_base = OTHER; note = 2' fluoro modified base
  modified_base 105: mod_base = OTHER; note = 2' fluoro modified base
  modified_base 108: mod_base = OTHER; note = 2' fluoro modified base
  modified_base 111: mod_base = OTHER; note = 2' fluoro modified base
  modified_base 114: mod_base = OTHER; note = 2' fluoro modified base
  modified_base 117: mod_base = OTHER; note = 2' fluoro modified base
  modified_base 121: mod_base = um
  modified_base 122: mod_base = OTHER; note = Phosphorothioate (PS) linkage
  modified_base 122: mod_base = um
  modified_base 123: mod_base = OTHER; note = Phosphorothioate (PS) linkage
  modified_base 123: mod_base = um
  modified_base 124: mod_base = OTHER; note = Phosphorothioate (PS) linkage
  source 1..124: mol_type = other RNA

SEQ ID NO: 1128 - RNA, 124 nt, synthetic construct; identical to SEQ ID NO: 1126
  modified_base 1: mod_base = um
  modified_base 2: mod_base = OTHER; note = Phosphorothioate (PS) linkage
  modified_base 2: mod_base = um
  modified_base 3: mod_base = OTHER; note = Phosphorothioate (PS) linkage
  modified_base 3: mod_base = gm
  modified_base 4: mod_base = OTHER; note = Phosphorothioate (PS) linkage
  modified_base 29: mod_base = gm
  modified_base 30: mod_base = cm
  modified_base 31: mod_base = um
  modified_base 32: mod_base = OTHER; note = 2'-O-methyladenosine
  modified_base 33: mod_base = gm
  modified_base 34: mod_base = OTHER; note = 2'-O-methyladenosine
  modified_base 35: mod_base = OTHER; note = 2'-O-methyladenosine
  modified_base 36: mod_base = OTHER; note = 2'-O-methyladenosine
  modified_base 37: mod_base = um
  modified_base 38: mod_base = OTHER; note = 2'-O-methyladenosine
  modified_base 39: mod_base = gm
  modified_base 40: mod_base = cm
  modified_base 68: mod_base = OTHER; note = 2'-O-methyladenosine
  modified_base 69: mod_base = OTHER; note = 2'-O-methyladenosine
  modified_base 70: mod_base = cm
  modified_base 71: mod_base = um
  modified_base 72: mod_base = um
  modified_base 73: mod_base = gm
  modified_base 74: mod_base = OTHER; note = 2'-O-methyladenosine
  modified_base 75: mod_base = OTHER; note = 2'-O-methyladenosine
  modified_base 76: mod_base = OTHER; note = 2'-O-methyladenosine
  modified_base 77: mod_base = OTHER; note = 2'-O-methyladenosine
  modified_base 78: mod_base = OTHER; note = 2'-O-methyladenosine
  modified_base 79: mod_base = gm
  modified_base 80: mod_base = um
  modified_base 81: mod_base = gm
  modified_base 82: mod_base = gm
  modified_base 83: mod_base = cm
  modified_base 84: mod_base = OTHER; note = 2'-O-methyladenosine
  modified_base 85: mod_base = cm
  modified_base 86: mod_base = cm
  modified_base 87: mod_base = gm
  modified_base 88: mod_base = OTHER; note = 2'-O-methyladenosine
  modified_base 89: mod_base = gm
  modified_base 90: mod_base = um
  modified_base 91: mod_base = cm
  modified_base 92: mod_base = gm
  modified_base 93: mod_base = gm
  modified_base 94: mod_base = um
  modified_base 95: mod_base = gm
  modified_base 96: mod_base = cm
  modified_base 99: mod_base = OTHER; note = 2' fluoro modified base
  modified_base 102: mod_base = OTHER; note = 2' fluoro modified base
  modified_base 105: mod_base = OTHER; note = 2' fluoro modified base
  modified_base 108: mod_base = OTHER; note = 2' fluoro modified base
  modified_base 111: mod_base = OTHER; note = 2' fluoro modified base
  modified_base 114: mod_base = OTHER; note = 2' fluoro modified base
  modified_base 117: mod_base = OTHER; note = 2' fluoro modified base
  modified_base 120: mod_base = um
  modified_base 121: mod_base = OTHER; note = Phosphorothioate (PS) linkage
  modified_base 121: mod_base = um
  modified_base 122: mod_base = OTHER; note = Phosphorothioate (PS) linkage
  modified_base 122: mod_base = um
  modified_base 123: mod_base = OTHER; note = Phosphorothioate (PS) linkage
  source 1..124: mol_type = other RNA

SEQ ID NO: 1129 - RNA, 124 nt, synthetic construct; identical to SEQ ID NO: 1126
  modified_base 1: mod_base = um
  modified_base 2: mod_base = OTHER; note = Phosphorothioate (PS) linkage
  modified_base 2: mod_base = um
  modified_base 3: mod_base = OTHER; note = Phosphorothioate (PS) linkage
  modified_base 3: mod_base = gm
  modified_base 4: mod_base = OTHER; note = Phosphorothioate (PS) linkage
  modified_base 29: mod_base = gm
  modified_base 30: mod_base = cm
  modified_base 31: mod_base = um
  modified_base 32: mod_base = OTHER; note = 2'-O-methyladenosine
  modified_base 33: mod_base = gm
  modified_base 34: mod_base = OTHER; note = 2'-O-methyladenosine
  modified_base 35: mod_base = OTHER; note = 2'-O-methyladenosine
  modified_base 36: mod_base = OTHER; note = 2'-O-methyladenosine
  modified_base 37: mod_base = um
  modified_base 38: mod_base = OTHER; note = 2'-O-methyladenosine
  modified_base 39: mod_base = gm
  modified_base 40: mod_base = cm
  modified_base 68: mod_base = OTHER; note = 2'-O-methyladenosine
  modified_base 69: mod_base = OTHER; note = 2'-O-methyladenosine
  modified_base 70: mod_base = cm
  modified_base 71: mod_base = um
  modified_base 72: mod_base = um
  modified_base 73: mod_base = gm
  modified_base 74: mod_base = OTHER; note = 2'-O-methyladenosine
  modified_base 75: mod_base = OTHER; note = 2'-O-methyladenosine
  modified_base 76: mod_base = OTHER; note = 2'-O-methyladenosine
  modified_base 77: mod_base = OTHER; note = 2'-O-methyladenosine
  modified_base 78: mod_base = OTHER; note = 2'-O-methyladenosine
  modified_base 79: mod_base = gm
  modified_base 80: mod_base = um
  modified_base 81: mod_base = gm
  modified_base 82: mod_base = gm
  modified_base 83: mod_base = cm
  modified_base 84: mod_base = OTHER; note = 2'-O-methyladenosine
  modified_base 85: mod_base = cm
  modified_base 86: mod_base = cm
  modified_base 87: mod_base = gm
  modified_base 88: mod_base = OTHER; note = 2'-O-methyladenosine
  modified_base 89: mod_base = gm
  modified_base 90: mod_base = um
  modified_base 91: mod_base = cm
  modified_base 92: mod_base = gm
  modified_base 93: mod_base = gm
  modified_base 94: mod_base = um
  modified_base 95: mod_base = gm
  modified_base 96: mod_base = cm
  modified_base 99: mod_base = OTHER; note = 2' fluoro modified base
  modified_base 102: mod_base = OTHER; note = 2' fluoro modified base
  modified_base 105: mod_base = OTHER; note = 2' fluoro modified base
  modified_base 108: mod_base = OTHER; note = 2' fluoro modified base
  modified_base 111: mod_base = OTHER; note = 2' fluoro modified base
  modified_base 114: mod_base = OTHER; note = 2' fluoro modified base
  modified_base 117: mod_base = OTHER; note = 2' fluoro modified base
  modified_base 119: mod_base = um
  modified_base 120: mod_base = OTHER; note = Phosphorothioate (PS) linkage
  modified_base 120: mod_base = um
  modified_base 121: mod_base = OTHER; note = Phosphorothioate (PS) linkage
  modified_base 121: mod_base = um
  modified_base 122: mod_base = OTHER; note = Phosphorothioate (PS) linkage
  source 1..124: mol_type = other RNA

SEQ ID NO: 1130 - RNA, 122 nt, synthetic construct; identical to SEQ ID NO: 37
  modified_base 1: mod_base = um
  modified_base 2: mod_base = OTHER; note = Phosphorothioate (PS) linkage
  modified_base 2: mod_base = um
  modified_base 3: mod_base = OTHER; note = Phosphorothioate (PS) linkage
  modified_base 3: mod_base = gm
  modified_base 4: mod_base = OTHER; note = Phosphorothioate (PS) linkage
  modified_base 29: mod_base = gm
  modified_base 30: mod_base = cm
  modified_base 31: mod_base = um
  modified_base 32: mod_base = OTHER; note = 2'-O-methyladenosine
  modified_base 33: mod_base = gm
  modified_base 34: mod_base = OTHER; note = 2'-O-methyladenosine
  modified_base 35: mod_base = OTHER; note = 2'-O-methyladenosine
  modified_base 36: mod_base = OTHER; note = 2'-O-methyladenosine
  modified_base 37: mod_base = um
  modified_base 38: mod_base = OTHER; note = 2'-O-methyladenosine
  modified_base 39: mod_base = gm
  modified_base 40: mod_base = cm
  modified_base 68: mod_base = OTHER; note = 2'-O-methyladenosine
  modified_base 69: mod_base = OTHER; note = 2'-O-methyladenosine
  modified_base 70: mod_base = cm
  modified_base 71: mod_base = um
  modified_base 72: mod_base = um
  modified_base 73: mod_base = gm
  modified_base 74: mod_base = OTHER; note = 2'-O-methyladenosine
  modified_base 75: mod_base = OTHER; note = 2'-O-methyladenosine
  modified_base 76: mod_base = OTHER; note = 2'-O-methyladenosine
  modified_base 77: mod_base = OTHER; note = 2'-O-methyladenosine
  modified_base 78: mod_base = OTHER; note = 2'-O-methyladenosine
  modified_base 79: mod_base = gm
  modified_base 80: mod_base = um
  modified_base 81: mod_base = gm
  modified_base 82: mod_base = gm
  modified_base 83: mod_base = cm
  modified_base 84: mod_base = OTHER; note = 2'-O-methyladenosine
  modified_base 85: mod_base = cm
  modified_base 86: mod_base = cm
  modified_base 87: mod_base = gm
  modified_base 88: mod_base = OTHER; note = 2'-O-methyladenosine
  modified_base 89: mod_base = gm
  modified_base 90: mod_base = um
  modified_base 91: mod_base = cm
  modified_base 92: mod_base = gm
  modified_base 93: mod_base = gm
  modified_base 94: mod_base = um
  modified_base 95: mod_base = gm
  modified_base 96: mod_base = cm
  modified_base 99: mod_base = OTHER; note = 2' fluoro modified base
  modified_base 102: mod_base = OTHER; note = 2' fluoro modified base
  modified_base 105: mod_base = OTHER; note = 2' fluoro modified base
  modified_base 108: mod_base = OTHER; note = 2' fluoro modified base
  modified_base 111: mod_base = OTHER; note = 2' fluoro modified base
  modified_base 114: mod_base = OTHER; note = 2' fluoro modified base
  modified_base 117: mod_base = OTHER; note = 2' fluoro modified base
  modified_base 120: mod_base = OTHER; note = Phosphorothioate (PS) linkage
  modified_base 121: mod_base = OTHER; note = Phosphorothioate (PS) linkage
  modified_base 122: mod_base = OTHER; note = Phosphorothioate (PS) linkage
  modified_base 122: mod_base = um
  source 1..122: mol_type = other RNA

SEQ ID NO: 1131 - RNA, 122 nt, synthetic construct; identical to SEQ ID NO: 37
  modified_base 1: mod_base = um
  modified_base 2: mod_base = OTHER; note = Phosphorothioate (PS) linkage
  modified_base 2: mod_base = um
  modified_base 3: mod_base = OTHER; note = Phosphorothioate (PS) linkage
  modified_base 3: mod_base = gm
  modified_base 4: mod_base = OTHER; note = Phosphorothioate (PS) linkage
  modified_base 29: mod_base = gm
  modified_base 30: mod_base = cm
  modified_base 31: mod_base = um
  modified_base 32: mod_base = OTHER; note = 2'-O-methyladenosine
  modified_base 33: mod_base = gm
  modified_base 34: mod_base = OTHER; note = 2'-O-methyladenosine
  modified_base 35: mod_base = OTHER; note = 2'-O-methyladenosine
  modified_base 36: mod_base = OTHER; note = 2'-O-methyladenosine
  modified_base 37: mod_base = um
  modified_base 38: mod_base = OTHER; note = 2'-O-methyladenosine
  modified_base 39: mod_base = gm
  modified_base 40: mod_base = cm
  modified_base 68: mod_base = OTHER; note = 2'-O-methyladenosine
  modified_base 69: mod_base = OTHER; note = 2'-O-methyladenosine
  modified_base 70: mod_base = cm
  modified_base 71: mod_base = um
  modified_base 72: mod_base = um
  modified_base 73: mod_base = gm
  modified_base 74: mod_base = OTHER; note = 2'-O-methyladenosine
  modified_base 75: mod_base = OTHER; note = 2'-O-methyladenosine
  modified_base 76: mod_base = OTHER; note = 2'-O-methyladenosine
  modified_base 77: mod_base = OTHER; note = 2'-O-methyladenosine
  modified_base 78: mod_base = OTHER; note = 2'-O-methyladenosine
  modified_base 79: mod_base = gm
  modified_base 80: mod_base = um
  modified_base 81: mod_base = gm
  modified_base 82: mod_base = gm
  modified_base 83: mod_base = cm
  modified_base 84: mod_base = OTHER; note = 2'-O-methyladenosine
  modified_base 85: mod_base = cm
  modified_base 86: mod_base = cm
  modified_base 87: mod_base = gm
  modified_base 88: mod_base = OTHER; note = 2'-O-methyladenosine
  modified_base 89: mod_base = gm
  modified_base 90: mod_base = um
  modified_base 91: mod_base = cm
  modified_base 92: mod_base = gm
  modified_base 93: mod_base = gm
  modified_base 94: mod_base = um
  modified_base 95: mod_base = gm
  modified_base 96: mod_base = cm
  modified_base 118: mod_base = OTHER; note = 2' fluoro modified base
  modified_base 119: mod_base = um
  modified_base 120: mod_base = OTHER; note = Phosphorothioate (PS) linkage
  modified_base 120: mod_base = um
  modified_base 121: mod_base = OTHER; note = Phosphorothioate (PS) linkage
  modified_base 121: mod_base = um
  modified_base 122: mod_base = OTHER; note = Phosphorothioate (PS) linkage
  modified_base 122: mod_base = um
  source 1..122: mol_type = other RNA

SEQ ID NO: 1132 - RNA, 122 nt, synthetic construct; identical to SEQ ID NO: 37
  modified_base 1: mod_base = um
  modified_base 2: mod_base = OTHER; note = Phosphorothioate (PS) linkage
  modified_base 2: mod_base = um
  modified_base 3: mod_base = OTHER; note = Phosphorothioate (PS) linkage
  modified_base 3: mod_base = gm
  modified_base 4: mod_base = OTHER; note = Phosphorothioate (PS) linkage
  modified_base 29: mod_base = gm
  modified_base 30: mod_base = cm
  modified_base 31: mod_base = um
  modified_base 32: mod_base = OTHER; note = 2'-O-methyladenosine
  modified_base 33: mod_base = gm
  modified_base 34: mod_base = OTHER; note = 2'-O-methyladenosine
  modified_base 35: mod_base = OTHER; note = 2'-O-methyladenosine
  modified_base 36: mod_base = OTHER; note = 2'-O-methyladenosine
  modified_base 37: mod_base = um
  modified_base 38: mod_base = OTHER; note = 2'-O-methyladenosine
  modified_base 39: mod_base = gm
  modified_base 40: mod_base = cm
  modified_base 68: mod_base = OTHER; note = 2'-O-methyladenosine
  modified_base 69: mod_base = OTHER; note = 2'-O-methyladenosine
  modified_base 70: mod_base = cm
  modified_base 71: mod_base = um
  modified_base 72: mod_base = um
  modified_base 73: mod_base = gm
  modified_base 74: mod_base = OTHER; note = 2'-O-methyladenosine
  modified_base 75: mod_base = OTHER; note = 2'-O-methyladenosine
  modified_base 76: mod_base = OTHER; note = 2'-O-methyladenosine
  modified_base 77: mod_base = OTHER; note = 2'-O-methyladenosine
  modified_base 78: mod_base = OTHER; note = 2'-O-methyladenosine
  modified_base 79: mod_base = gm
  modified_base 80: mod_base = um
  modified_base 81: mod_base = gm
  modified_base 82: mod_base = gm
  modified_base 83: mod_base = cm
  modified_base 84: mod_base = OTHER; note = 2'-O-methyladenosine
  modified_base 85: mod_base = cm
  modified_base 86: mod_base = cm
  modified_base 87: mod_base = gm
  modified_base 88: mod_base = OTHER; note = 2'-O-methyladenosine
  modified_base 89: mod_base = gm
  modified_base 90: mod_base = um
  modified_base 91: mod_base = cm
  modified_base 92: mod_base = gm
  modified_base 93: mod_base = gm
  modified_base 94: mod_base = um
  modified_base 95: mod_base = gm
  modified_base 96: mod_base = cm
  modified_base 117: mod_base = OTHER; note = 2' fluoro modified base
  modified_base 119: mod_base = um
  modified_base 120: mod_base = OTHER; note = Phosphorothioate (PS) linkage
  modified_base 120: mod_base = um
  modified_base 121: mod_base = OTHER; note = Phosphorothioate (PS) linkage
  modified_base 121: mod_base = um
  modified_base 122: mod_base = OTHER; note = Phosphorothioate (PS) linkage
  modified_base 122: mod_base = um
  source 1..122: mol_type = other RNA

SEQ ID NO: 1133 - RNA, 122 nt, synthetic construct; identical to SEQ ID NO: 37
  modified_base 1: mod_base = um
  modified_base 2: mod_base = OTHER; note = Phosphorothioate (PS) linkage
  modified_base 2: mod_base = um
  modified_base 3: mod_base = OTHER; note = Phosphorothioate (PS) linkage
  modified_base 3: mod_base = gm
  modified_base 4: mod_base = OTHER; note = Phosphorothioate (PS) linkage
  modified_base 29: mod_base = gm
  modified_base 30: mod_base = cm
  modified_base 31: mod_base = um
  modified_base 32: mod_base = OTHER; note = 2'-O-methyladenosine
  modified_base 33: mod_base = gm
  modified_base 34: mod_base = OTHER; note = 2'-O-methyladenosine
  modified_base 35: mod_base = OTHER; note = 2'-O-methyladenosine
  modified_base 36: mod_base = OTHER; note = 2'-O-methyladenosine
  modified_base 37: mod_base = um
  modified_base 38: mod_base = OTHER; note = 2'-O-methyladenosine
  modified_base 39: mod_base = gm
  modified_base 40: mod_base = cm
  modified_base 68: mod_base = OTHER; note = 2'-O-methyladenosine
  modified_base 69: mod_base = OTHER; note = 2'-O-methyladenosine
  modified_base 70: mod_base = cm
  modified_base 71: mod_base = um
  modified_base 72: mod_base = um
  modified_base 73: mod_base = gm
  modified_base 74: mod_base = OTHER; note = 2'-O-methyladenosine
  modified_base 75: mod_base = OTHER; note = 2'-O-methyladenosine
  modified_base 76: mod_base = OTHER; note = 2'-O-methyladenosine
  modified_base 77: mod_base = OTHER; note = 2'-O-methyladenosine
  modified_base 78: mod_base = OTHER; note = 2'-O-methyladenosine
  modified_base 79: mod_base = gm
  modified_base 80: mod_base = um
  modified_base 81: mod_base = gm
  modified_base 82: mod_base = gm
  modified_base 83: mod_base = cm
  modified_base 84: mod_base = OTHER; note = 2'-O-methyladenosine
  modified_base 85: mod_base = cm
  modified_base 86: mod_base = cm
  modified_base 87: mod_base = gm
  modified_base 88: mod_base = OTHER; note = 2'-O-methyladenosine
  modified_base 89: mod_base = gm
  modified_base 90: mod_base = um
  modified_base 91: mod_base = cm
  modified_base 92: mod_base = gm
  modified_base 93: mod_base = gm
  modified_base 94: mod_base = um
  modified_base 95: mod_base = gm
  modified_base 96: mod_base = cm
  modified_base 116: mod_base = OTHER; note = 2' fluoro modified base
  modified_base 119: mod_base = um
  modified_base 120: mod_base = OTHER; note = Phosphorothioate (PS) linkage
  modified_base 120: mod_base = um
  modified_base 121: mod_base = OTHER; note = Phosphorothioate (PS) linkage
  modified_base 121: mod_base = um
  modified_base 122: mod_base = OTHER; note = Phosphorothioate (PS) linkage
  modified_base 122: mod_base = um
  source 1..122: mol_type = other RNA

SEQ ID NO: 1134 - RNA, 122 nt, synthetic construct; identical to SEQ ID NO: 37
  modified_base 1: mod_base = um
  modified_base 2: mod_base = OTHER; note = Phosphorothioate (PS) linkage
  modified_base 2: mod_base = um
  modified_base 3: mod_base = OTHER; note = Phosphorothioate (PS) linkage
  modified_base 3: mod_base = gm
  modified_base 4: mod_base = OTHER; note = Phosphorothioate (PS) linkage
  modified_base 29: mod_base = gm
  modified_base 30: mod_base = cm
  modified_base 31: mod_base = um
  modified_base 32: mod_base = OTHER; note = 2'-O-methyladenosine
  modified_base 33: mod_base = gm
  modified_base 34: mod_base = OTHER; note = 2'-O-methyladenosine
  modified_base 35: mod_base = OTHER; note = 2'-O-methyladenosine
  modified_base 36: mod_base = OTHER; note = 2'-O-methyladenosine
  modified_base 37: mod_base = um
  modified_base 38: mod_base = OTHER; note = 2'-O-methyladenosine
  modified_base 39: mod_base = gm
  modified_base 40: mod_base = cm
  modified_base 68: mod_base = OTHER; note = 2'-O-methyladenosine
  modified_base 69: mod_base = OTHER; note = 2'-O-methyladenosine
  modified_base 70: mod_base = cm
  modified_base 71: mod_base = um
  modified_base 72: mod_base = um
  modified_base 73: mod_base = gm
  modified_base 74: mod_base = OTHER; note = 2'-O-methyladenosine
  modified_base 75: mod_base = OTHER; note = 2'-O-methyladenosine
  modified_base 76: mod_base = OTHER; note = 2'-O-methyladenosine
  modified_base 77: mod_base = OTHER; note = 2'-O-methyladenosine
  modified_base 78: mod_base = OTHER; note = 2'-O-methyladenosine
  modified_base 79: mod_base = gm
  modified_base 80: mod_base = um
  modified_base 81: mod_base = gm
  modified_base 82: mod_base = gm
  modified_base 83: mod_base = cm
  modified_base 84: mod_base = OTHER; note = 2'-O-methyladenosine
  modified_base 85: mod_base = cm
  modified_base 86: mod_base = cm
  modified_base 87: mod_base = gm
  modified_base 88: mod_base = OTHER; note = 2'-O-methyladenosine
  modified_base 89: mod_base = gm
  modified_base 90: mod_base = um
  modified_base 91: mod_base = cm
  modified_base 92: mod_base = gm
  modified_base 93: mod_base = gm
  modified_base 94: mod_base = um
  modified_base 95: mod_base = gm
  modified_base 96: mod_base = cm
  modified_base 115: mod_base = OTHER; note = 2' fluoro modified base
  modified_base 119: mod_base = um
  modified_base 120: mod_base = OTHER; note = Phosphorothioate (PS) linkage
  modified_base 120: mod_base = um
  modified_base 121: mod_base = OTHER; note = Phosphorothioate (PS) linkage
  modified_base 121: mod_base = um
  modified_base 122: mod_base = OTHER; note = Phosphorothioate (PS) linkage
  modified_base 122: mod_base = um
  source 1..122: mol_type = other RNA

SEQ ID NO: 1135 - RNA, 122 nt, synthetic construct; identical to SEQ ID NO: 37
  modified_base 1: mod_base = um
  modified_base 2: mod_base = OTHER; note = Phosphorothioate (PS) linkage
  modified_base 2: mod_base = um
  modified_base 3: mod_base = OTHER; note = Phosphorothioate (PS) linkage
  modified_base 3: mod_base = gm
  modified_base 4: mod_base = OTHER; note = Phosphorothioate (PS) linkage
  modified_base 29: mod_base = gm
  modified_base 30: mod_base = cm
  modified_base 31: mod_base = um
  modified_base 32: mod_base = OTHER; note = 2'-O-methyladenosine
  modified_base 33: mod_base = gm
  modified_base 34: mod_base = OTHER; note = 2'-O-methyladenosine
  modified_base 35: mod_base = OTHER; note = 2'-O-methyladenosine
  modified_base 36: mod_base = OTHER; note = 2'-O-methyladenosine
  modified_base 37: mod_base = um
  modified_base 38: mod_base = OTHER; note = 2'-O-methyladenosine
  modified_base 39: mod_base = gm
  modified_base 40: mod_base = cm
  modified_base 68: mod_base = OTHER; note = 2'-O-methyladenosine
  modified_base 69: mod_base = OTHER; note = 2'-O-methyladenosine
  modified_base 70: mod_base = cm
  modified_base 71: mod_base = um
  modified_base 72: mod_base = um
  modified_base 73: mod_base = gm
  modified_base 74: mod_base = OTHER; note = 2'-O-methyladenosine
  modified_base 75: mod_base = OTHER; note = 2'-O-methyladenosine
  modified_base 76: mod_base = OTHER; note = 2'-O-methyladenosine
  modified_base 77: mod_base = OTHER; note = 2'-O-methyladenosine
  modified_base 78: mod_base = OTHER; note = 2'-O-methyladenosine
  modified_base 79: mod_base = gm
  modified_base 80: mod_base = um
  modified_base 81: mod_base = gm
  modified_base 82: mod_base = gm
  modified_base 83: mod_base = cm
  modified_base 84: mod_base = OTHER; note = 2'-O-methyladenosine
  modified_base 85: mod_base = cm
  modified_base 86: mod_base = cm
  modified_base 87: mod_base = gm
  modified_base 88: mod_base = OTHER; note = 2'-O-methyladenosine
  modified_base 89: mod_base = gm
  modified_base 90: mod_base = um
  modified_base 91: mod_base = cm
  modified_base 92: mod_base = gm
  modified_base 93: mod_base = gm
  modified_base 94: mod_base = um
  modified_base 95: mod_base = gm
  modified_base 96: mod_base = cm
  modified_base 114: mod_base = OTHER; note = 2' fluoro modified base
  modified_base 119: mod_base = um
  modified_base 120: mod_base = OTHER; note = Phosphorothioate (PS) linkage
  modified_base 120: mod_base = um
  modified_base 121: mod_base = OTHER; note = Phosphorothioate (PS) linkage
  modified_base 121: mod_base = um
  modified_base 122: mod_base = OTHER; note = Phosphorothioate (PS) linkage
  modified_base 122: mod_base = um
  source 1..122: mol_type = other RNA

SEQ ID NO: 1136 - RNA, 122 nt, synthetic construct; identical to SEQ ID NO: 37
  modified_base 1: mod_base = um
  modified_base 2: mod_base = OTHER; note = Phosphorothioate (PS) linkage
  modified_base 2: mod_base = um
  modified_base 3: mod_base = OTHER; note = Phosphorothioate (PS) linkage
  modified_base 3: mod_base = gm
  modified_base 4: mod_base = OTHER; note = Phosphorothioate (PS) linkage
  modified_base 29: mod_base = gm
  modified_base 30: mod_base = cm
  modified_base 31: mod_base = um
  modified_base 32: mod_base = OTHER; note = 2'-O-methyladenosine
  modified_base 33: mod_base = gm
  modified_base 34: mod_base = OTHER; note = 2'-O-methyladenosine
  modified_base 35: mod_base = OTHER; note = 2'-O-methyladenosine
  modified_base 36: mod_base = OTHER; note = 2'-O-methyladenosine
  modified_base 37: mod_base = um
  modified_base 38: mod_base = OTHER; note = 2'-O-methyladenosine
  modified_base 39: mod_base = gm
  modified_base 40: mod_base = cm
  modified_base 68: mod_base = OTHER; note = 2'-O-methyladenosine
  modified_base 69: mod_base = OTHER; note = 2'-O-methyladenosine
  modified_base 70: mod_base = cm
  modified_base 71: mod_base = um
  modified_base 72: mod_base = um
  modified_base 73: mod_base = gm
  modified_base 74: mod_base = OTHER; note = 2'-O-methyladenosine
  modified_base 75: mod_base = OTHER; note = 2'-O-methyladenosine
  modified_base 76: mod_base = OTHER; note = 2'-O-methyladenosine
  modified_base 77: mod_base = OTHER; note = 2'-O-methyladenosine
  modified_base 78: mod_base = OTHER; note = 2'-O-methyladenosine
  modified_base 79: mod_base = gm
  modified_base 80: mod_base = um
  modified_base 81: mod_base = gm
  modified_base 82: mod_base = gm
  modified_base 83: mod_base = cm
  modified_base 84: mod_base = OTHER; note = 2'-O-methyladenosine
  modified_base 85: mod_base = cm
  modified_base 86: mod_base = cm
  modified_base 87: mod_base = gm
  modified_base 88: mod_base = OTHER; note = 2'-O-methyladenosine
  modified_base 89: mod_base = gm
  modified_base 90: mod_base = um
  modified_base 91: mod_base = cm
  modified_base 92: mod_base = gm
  modified_base 93: mod_base = gm
  modified_base 94: mod_base = um
  modified_base 95: mod_base = gm
  modified_base 96: mod_base = cm
  modified_base 113: mod_base = OTHER; note = 2' fluoro modified base
  modified_base 119: mod_base = um
  modified_base 120: mod_base = OTHER; note = Phosphorothioate (PS) linkage
  modified_base 120: mod_base = um
  modified_base 121: mod_base = OTHER; note = Phosphorothioate (PS) linkage
  modified_base 121: mod_base = um
  modified_base 122: mod_base = OTHER; note = Phosphorothioate (PS) linkage
  modified_base 122: mod_base = um
  source 1..122: mol_type = other RNA

SEQ ID NO: 1137 - RNA, 122 nt, synthetic construct; identical to SEQ ID NO: 37
  modified_base 1: mod_base = um
  modified_base 2: mod_base = OTHER; note = Phosphorothioate (PS) linkage
  modified_base 2: mod_base = um
  modified_base 3: mod_base = OTHER; note = Phosphorothioate (PS) linkage
  modified_base 3: mod_base = gm
  modified_base 4: mod_base = OTHER; note = Phosphorothioate (PS) linkage
  modified_base 29: mod_base = gm
  modified_base 30: mod_base = cm
  modified_base 31: mod_base = um
  modified_base 32: mod_base = OTHER; note = 2'-O-methyladenosine
  modified_base 33: mod_base = gm
  modified_base 34: mod_base = OTHER; note = 2'-O-methyladenosine
  modified_base 35: mod_base = OTHER; note = 2'-O-methyladenosine
  modified_base 36: mod_base = OTHER; note = 2'-O-methyladenosine
  modified_base 37: mod_base = um
  modified_base 38: mod_base = OTHER; note = 2'-O-methyladenosine
  modified_base 39: mod_base = gm
  modified_base 40: mod_base = cm
  modified_base 68: mod_base = OTHER; note = 2'-O-methyladenosine
  modified_base 69: mod_base = OTHER; note = 2'-O-methyladenosine
  modified_base 70: mod_base = cm
  modified_base 71: mod_base = um
  modified_base 72: mod_base = um
  modified_base 73: mod_base = gm
  modified_base 74: mod_base = OTHER; note = 2'-O-methyladenosine
  modified_base 75: mod_base = OTHER; note = 2'-O-methyladenosine
  modified_base 76: mod_base = OTHER; note = 2'-O-methyladenosine
  modified_base 77: mod_base = OTHER; note = 2'-O-methyladenosine
  modified_base 78: mod_base = OTHER; note = 2'-O-methyladenosine
  modified_base 79: mod_base = gm
  modified_base 80: mod_base = um
  modified_base 81: mod_base = gm
  modified_base 82: mod_base = gm
  modified_base 83: mod_base = cm
  modified_base 84: mod_base = OTHER; note = 2'-O-methyladenosine
  modified_base 85: mod_base = cm
  modified_base 86: mod_base = cm
  modified_base 87: mod_base = gm
  modified_base 88: mod_base = OTHER; note = 2'-O-methyladenosine
  modified_base 89: mod_base = gm
  modified_base 90: mod_base = um
  modified_base 91: mod_base = cm
  modified_base 92: mod_base = gm
  modified_base 93: mod_base = gm
  modified_base 94: mod_base = um
  modified_base 95: mod_base = gm
  modified_base 96: mod_base = cm
  modified_base 112: mod_base = OTHER; note = 2' fluoro modified base
  modified_base 119: mod_base = um
  modified_base 120: mod_base = OTHER; note = Phosphorothioate (PS) linkage
  modified_base 120: mod_base = um
  modified_base 121: mod_base = OTHER; note = Phosphorothioate (PS) linkage
  modified_base 121: mod_base = um
  modified_base 122: mod_base = OTHER; note = Phosphorothioate (PS) linkage
  modified_base 122: mod_base = um
  source 1..122: mol_type = other RNA

SEQ ID NO: 1138 - RNA, 122 nt, synthetic construct; identical to SEQ ID NO: 37
  modified_base 1: mod_base = um
  modified_base 2: mod_base = OTHER; note = Phosphorothioate (PS) linkage
  modified_base 2: mod_base = um
  modified_base 3: mod_base = OTHER; note = Phosphorothioate (PS) linkage
  modified_base 3: mod_base = gm
  modified_base 4: mod_base = OTHER; note = Phosphorothioate (PS) linkage
  modified_base 29: mod_base = gm
  modified_base 30: mod_base = cm
  modified_base 31: mod_base = um
  modified_base 32: mod_base = OTHER; note = 2'-O-methyladenosine
  modified_base 33: mod_base = gm
  modified_base 34: mod_base = OTHER; note = 2'-O-methyladenosine
  modified_base 35: mod_base = OTHER; note = 2'-O-methyladenosine
  modified_base 36: mod_base = OTHER; note = 2'-O-methyladenosine
  modified_base 37: mod_base = um
  modified_base 38: mod_base = OTHER; note = 2'-O-methyladenosine
  modified_base 39: mod_base = gm
  modified_base 40: mod_base = cm
  modified_base 68: mod_base = OTHER; note = 2'-O-methyladenosine
  modified_base 69: mod_base = OTHER; note = 2'-O-methyladenosine
  modified_base 70: mod_base = cm
  modified_base 71: mod_base = um
  modified_base 72: mod_base = um
  modified_base 73: mod_base = gm
  modified_base 74: mod_base = OTHER; note = 2'-O-methyladenosine
  modified_base 75: mod_base = OTHER; note = 2'-O-methyladenosine
  modified_base 76: mod_base = OTHER; note = 2'-O-methyladenosine
  modified_base 77: mod_base = OTHER; note = 2'-O-methyladenosine
  modified_base 78: mod_base = OTHER; note = 2'-O-methyladenosine
  modified_base 79: mod_base = gm
  modified_base 80: mod_base = um
  modified_base 81: mod_base = gm
  modified_base 82: mod_base = gm
  modified_base 83: mod_base = cm
  modified_base 84: mod_base = OTHER; note = 2'-O-methyladenosine
  modified_base 85: mod_base = cm
  modified_base 86: mod_base = cm
  modified_base 87: mod_base = gm
  modified_base 88: mod_base = OTHER; note = 2'-O-methyladenosine
  modified_base 89: mod_base = gm
  modified_base 90: mod_base = um
  modified_base 91: mod_base = cm
  modified_base 92: mod_base = gm
  modified_base 93: mod_base = gm
  modified_base 94: mod_base = um
  modified_base 95: mod_base = gm
  modified_base 96: mod_base = cm
  modified_base 111: mod_base = OTHER; note = 2' fluoro modified base
  modified_base 119: mod_base = um
  modified_base 120: mod_base = OTHER; note = Phosphorothioate (PS) linkage
  modified_base 120: mod_base = um
  modified_base 121: mod_base = OTHER; note = Phosphorothioate (PS) linkage
  modified_base 121: mod_base = um
  modified_base 122: mod_base = OTHER; note = Phosphorothioate (PS) linkage
  modified_base 122: mod_base = um
  source 1..122: mol_type = other RNA

SEQ ID NO: 1139 - RNA, 122 nt, synthetic construct; identical to SEQ ID NO: 37
  modified_base 1: mod_base = um
  modified_base 2: mod_base = OTHER; note = Phosphorothioate (PS) linkage
  modified_base 2: mod_base = um
  modified_base 3: mod_base = OTHER; note = Phosphorothioate (PS) linkage
  modified_base 3: mod_base = gm
  modified_base 4: mod_base = OTHER; note = Phosphorothioate (PS) linkage
  modified_base 29: mod_base = gm
  modified_base 30: mod_base = cm
  modified_base 31: mod_base = um
  modified_base 32: mod_base = OTHER; note = 2'-O-methyladenosine
  modified_base 33: mod_base = gm
  modified_base 34: mod_base = OTHER; note = 2'-O-methyladenosine
  modified_base 35: mod_base = OTHER; note = 2'-O-methyladenosine
  modified_base 36: mod_base = OTHER; note = 2'-O-methyladenosine
  modified_base 37: mod_base = um
  modified_base 38: mod_base = OTHER; note = 2'-O-methyladenosine
  modified_base 39: mod_base = gm
  modified_base 40: mod_base = cm
  modified_base 68: mod_base = OTHER; note = 2'-O-methyladenosine
  modified_base 69: mod_base = OTHER; note = 2'-O-methyladenosine
  modified_base 70: mod_base = cm
  modified_base 71: mod_base = um
  modified_base 72: mod_base = um
  modified_base 73: mod_base = gm
  modified_base 74: mod_base = OTHER; note = 2'-O-methyladenosine
  modified_base 75: mod_base = OTHER; note = 2'-O-methyladenosine
  modified_base 76: mod_base = OTHER; note = 2'-O-methyladenosine
  modified_base 77: mod_base = OTHER; note = 2'-O-methyladenosine
  modified_base 78: mod_base = OTHER; note = 2'-O-methyladenosine
  modified_base 79: mod_base = gm
  modified_base 80: mod_base = um
  modified_base 81: mod_base = gm
  modified_base 82: mod_base = gm
  modified_base 83: mod_base = cm
  modified_base 84: mod_base = OTHER; note = 2'-O-methyladenosine
  modified_base 85: mod_base = cm
  modified_base 86: mod_base = cm
  modified_base 87: mod_base = gm
  modified_base 88: mod_base = OTHER; note = 2'-O-methyladenosine
  modified_base 89: mod_base = gm
  modified_base 90: mod_base = um
  modified_base 91: mod_base = cm
  modified_base 92: mod_base = gm
  modified_base 93: mod_base = gm
  modified_base 94: mod_base = um
  modified_base 95: mod_base = gm
  modified_base 96: mod_base = cm
  modified_base 110: mod_base = OTHER; note = 2' fluoro modified base
  modified_base 119: mod_base = um
  modified_base 120: mod_base = OTHER; note = Phosphorothioate (PS) linkage
  modified_base 120: mod_base = um
  modified_base 121: mod_base = OTHER; note = Phosphorothioate (PS) linkage
  modified_base 121: mod_base = um
  modified_base 122: mod_base = OTHER; note = Phosphorothioate (PS) linkage
  modified_base 122: mod_base = um
  source 1..122: mol_type = other RNA

SEQ ID NO: 1140 - RNA, 122 nt, synthetic construct; identical to SEQ ID NO: 37
  modified_base 1: mod_base = um
  modified_base 2: mod_base = OTHER; note = Phosphorothioate (PS) linkage
  modified_base 2: mod_base = um
  modified_base 3: mod_base = OTHER; note = Phosphorothioate (PS) linkage
  modified_base 3: mod_base = gm
  modified_base 4: mod_base = OTHER; note = Phosphorothioate (PS) linkage
  modified_base 29: mod_base = gm
  modified_base 30: mod_base = cm
  modified_base 31: mod_base = um
  modified_base 32: mod_base = OTHER; note = 2'-O-methyladenosine
  modified_base 33: mod_base = gm
  modified_base 34: mod_base = OTHER; note = 2'-O-methyladenosine
  modified_base 35: mod_base = OTHER; note = 2'-O-methyladenosine
  modified_base 36: mod_base = OTHER; note = 2'-O-methyladenosine
  modified_base 37: mod_base = um
  modified_base 38: mod_base = OTHER; note = 2'-O-methyladenosine
  modified_base 39: mod_base = gm
  modified_base 40: mod_base = cm
  modified_base 68: mod_base = OTHER; note = 2'-O-methyladenosine
  modified_base 69: mod_base = OTHER; note = 2'-O-methyladenosine
  modified_base 70: mod_base = cm
  modified_base 71: mod_base = um
  modified_base 72: mod_base = um
  modified_base 73: mod_base = gm
  modified_base 74: mod_base = OTHER; note = 2'-O-methyladenosine
  modified_base 75: mod_base = OTHER; note = 2'-O-methyladenosine
  modified_base 76: mod_base = OTHER; note = 2'-O-methyladenosine
  modified_base 77: mod_base = OTHER; note = 2'-O-methyladenosine
  modified_base 78: mod_base = OTHER; note = 2'-O-methyladenosine
  modified_base 79: mod_base = gm
  modified_base 80: mod_base = um
  modified_base 81: mod_base = gm
  modified_base 82: mod_base = gm
  modified_base 83: mod_base = cm
  modified_base 84: mod_base = OTHER; note = 2'-O-methyladenosine
  modified_base 85: mod_base = cm
  modified_base 86: mod_base = cm
  modified_base 87: mod_base = gm
  modified_base 88: mod_base = OTHER; note = 2'-O-methyladenosine
  modified_base 89: mod_base = gm
  modified_base 90: mod_base = um
  modified_base 91: mod_base = cm
  modified_base 92: mod_base = gm
  modified_base 93: mod_base = gm
  modified_base 94: mod_base = um
  modified_base 95: mod_base = gm
  modified_base 96: mod_base = cm
  modified_base 110: mod_base = OTHER; note = 2' fluoro modified base
  modified_base 111: mod_base = OTHER; note = 2' fluoro modified base
  modified_base 112: mod_base = OTHER; note = 2' fluoro modified base
  modified_base 119: mod_base = um
  modified_base 120: mod_base = OTHER; note = Phosphorothioate (PS) linkage
  modified_base 120: mod_base = um
  modified_base 121: mod_base = OTHER; note = Phosphorothioate (PS) linkage
  modified_base 121: mod_base = um
  modified_base 122: mod_base = OTHER; note = Phosphorothioate (PS) linkage
  modified_base 122: mod_base = um
  source 1..122: mol_type = other RNA

SEQ ID NO: 1141 - RNA, 122 nt, synthetic construct; identical to SEQ ID NO: 37
  modified_base 1: mod_base = um
  modified_base 2: mod_base = OTHER; note = Phosphorothioate (PS) linkage
  modified_base 2: mod_base = um
  modified_base 3: mod_base = OTHER; note = Phosphorothioate (PS) linkage
  modified_base 3: mod_base = gm
  modified_base 4: mod_base = OTHER; note = Phosphorothioate (PS) linkage
  modified_base 29: mod_base = gm
  modified_base 30: mod_base = cm
  modified_base 31: mod_base = um
  modified_base 32: mod_base = OTHER; note = 2'-O-methyladenosine
  modified_base 33: mod_base = gm
  modified_base 34: mod_base = OTHER; note = 2'-O-methyladenosine
  modified_base 35: mod_base = OTHER; note = 2'-O-methyladenosine
  modified_base 36: mod_base = OTHER; note = 2'-O-methyladenosine
  modified_base 37: mod_base = um
  modified_base 38: mod_base = OTHER; note = 2'-O-methyladenosine
  modified_base 39: mod_base = gm
  modified_base 40: mod_base = cm
  modified_base 68: mod_base = OTHER; note = 2'-O-methyladenosine
  modified_base 69: mod_base = OTHER; note = 2'-O-methyladenosine
  modified_base 70: mod_base = cm
  modified_base 71: mod_base = um
  modified_base 72: mod_base = um
  modified_base 73: mod_base = gm
  modified_base 74: mod_base = OTHER; note = 2'-O-methyladenosine
  modified_base 75: mod_base = OTHER; note = 2'-O-methyladenosine
  modified_base 76: mod_base = OTHER; note = 2'-O-methyladenosine
  modified_base 77: mod_base = OTHER; note = 2'-O-methyladenosine
  modified_base 78: mod_base = OTHER; note = 2'-O-methyladenosine
  modified_base 79: mod_base = gm
  modified_base 80: mod_base = um
  modified_base 81: mod_base = gm
  modified_base 82: mod_base = gm
  modified_base 83: mod_base = cm
  modified_base 84: mod_base = OTHER; note = 2'-O-methyladenosine
  modified_base 85: mod_base = cm
  modified_base 86: mod_base = cm
  modified_base 87: mod_base = gm
  modified_base 88: mod_base = OTHER; note = 2'-O-methyladenosine
  modified_base 89: mod_base = gm
  modified_base 90: mod_base = um
  modified_base 91: mod_base = cm
  modified_base 92: mod_base = gm
  modified_base 93: mod_base = gm
  modified_base 94: mod_base = um
  modified_base 95: mod_base = gm
  modified_base 96: mod_base = cm
  modified_base 110: mod_base = OTHER; note = 2' fluoro modified base
  modified_base 111: mod_base = OTHER; note = 2' fluoro modified base
  modified_base 119: mod_base = um
  modified_base 120: mod_base = OTHER; note = Phosphorothioate (PS) linkage
  modified_base 120: mod_base = um
  modified_base 121: mod_base = OTHER; note = Phosphorothioate (PS) linkage
  modified_base 121: mod_base = um
  modified_base 122: mod_base = OTHER; note = Phosphorothioate (PS) linkage
  modified_base 122: mod_base = um
  source 1..122: mol_type = other RNA

SEQ ID NO: 1142 - RNA, 122 nt, synthetic construct; identical to SEQ ID NO: 37
  modified_base 1: mod_base = um
  modified_base 2: mod_base = OTHER; note = Phosphorothioate (PS) linkage
  modified_base 2: mod_base = um
  modified_base 3: mod_base = OTHER; note = Phosphorothioate (PS) linkage
  modified_base 3: mod_base = gm
  modified_base 4: mod_base = OTHER; note = Phosphorothioate (PS) linkage
  modified_base 29: mod_base = gm
  modified_base 30: mod_base = cm
  modified_base 31: mod_base = um
  modified_base 32: mod_base = OTHER; note = 2'-O-methyladenosine
  modified_base 33: mod_base = gm
  modified_base 34: mod_base = OTHER; note = 2'-O-methyladenosine
  modified_base 35: mod_base = OTHER; note = 2'-O-methyladenosine
  modified_base 36: mod_base = OTHER; note = 2'-O-methyladenosine
  modified_base 37: mod_base = um
  modified_base 38: mod_base = OTHER; note = 2'-O-methyladenosine
  modified_base 39: mod_base = gm
  modified_base 40: mod_base = cm
  modified_base 68: mod_base = OTHER; note = 2'-O-methyladenosine
  modified_base 69: mod_base = OTHER; note = 2'-O-methyladenosine
  modified_base 70: mod_base = cm
  modified_base 71: mod_base = um
  modified_base 72: mod_base = um
  modified_base 73: mod_base = gm
  modified_base 74: mod_base = OTHER; note = 2'-O-methyladenosine
  modified_base 75: mod_base = OTHER; note = 2'-O-methyladenosine
  modified_base 76: mod_base = OTHER; note = 2'-O-methyladenosine
  modified_base 77: mod_base = OTHER; note = 2'-O-methyladenosine
  modified_base 78: mod_base = OTHER; note = 2'-O-methyladenosine
  modified_base 79: mod_base = gm
  modified_base 80: mod_base = um
  modified_base 81: mod_base = gm
  modified_base 82: mod_base = gm
  modified_base 83: mod_base = cm
  modified_base 84: mod_base = OTHER; note = 2'-O-methyladenosine
  modified_base 85: mod_base = cm
  modified_base 86: mod_base = cm
  modified_base 87: mod_base = gm
  modified_base 88: mod_base = OTHER; note = 2'-O-methyladenosine
  modified_base 89: mod_base = gm
  modified_base 90: mod_base = um
  modified_base 91: mod_base = cm
  modified_base 92: mod_base = gm
  modified_base 93: mod_base = gm
  modified_base 94: mod_base = um
  modified_base 95: mod_base = gm
  modified_base 96: mod_base = cm
  modified_base 110: mod_base = OTHER; note = 2' fluoro modified base
  modified_base 112: mod_base = OTHER; note = 2' fluoro modified base
  modified_base 119: mod_base = um
  modified_base 120: mod_base = OTHER; note = Phosphorothioate (PS) linkage
  modified_base 120: mod_base = um
  modified_base 121: mod_base = OTHER; note = Phosphorothioate (PS) linkage
  modified_base 121: mod_base = um
  modified_base 122: mod_base = OTHER; note = Phosphorothioate (PS) linkage
  modified_base 122: mod_base = um
  source 1..122: mol_type = other RNA

SEQ ID NO: 1143 - RNA, 122 nt, synthetic construct; identical to SEQ ID NO: 37
  modified_base 1: mod_base = um
  modified_base 2: mod_base = OTHER; note = Phosphorothioate (PS) linkage
  modified_base 2: mod_base = um
  modified_base 3: mod_base = OTHER; note = Phosphorothioate (PS) linkage
  modified_base 3: mod_base = gm
  modified_base 4: mod_base = OTHER; note = Phosphorothioate (PS) linkage
  modified_base 29: mod_base = gm
  modified_base 30: mod_base = cm
  modified_base 31: mod_base = um
  modified_base 32: mod_base = OTHER; note = 2'-O-methyladenosine
  modified_base 33: mod_base = gm
  modified_base 34: mod_base = OTHER; note = 2'-O-methyladenosine
  modified_base 35: mod_base = OTHER; note = 2'-O-methyladenosine
  modified_base 36: mod_base = OTHER; note = 2'-O-methyladenosine
  modified_base 37: mod_base = um
  modified_base 38: mod_base = OTHER; note = 2'-O-methyladenosine
  modified_base 39: mod_base = gm
  modified_base 40: mod_base = cm
  modified_base 68: mod_base = OTHER; note = 2'-O-methyladenosine
  modified_base 69: mod_base = OTHER; note = 2'-O-methyladenosine
  modified_base 70: mod_base = cm
  modified_base 71: mod_base = um
  modified_base 72: mod_base = um
  modified_base 73: mod_base = gm
  modified_base 74: mod_base = OTHER; note = 2'-O-methyladenosine
  modified_base 75: mod_base = OTHER; note = 2'-O-methyladenosine
  modified_base 76: mod_base = OTHER; note = 2'-O-methyladenosine
  modified_base 77: mod_base = OTHER; note = 2'-O-methyladenosine
  modified_base 78: mod_base = OTHER; note = 2'-O-methyladenosine
  modified_base 79: mod_base = gm
  modified_base 80: mod_base = um
  modified_base 81: mod_base = gm
  modified_base 82: mod_base = gm
  modified_base 83: mod_base = cm
  modified_base 84: mod_base = OTHER; note = 2'-O-methyladenosine
  modified_base 85: mod_base = cm
  modified_base 86: mod_base = cm
  modified_base 87: mod_base = gm
  modified_base 88: mod_base = OTHER; note = 2'-O-methyladenosine
  modified_base 89: mod_base = gm
  modified_base 90: mod_base = um
  modified_base 91: mod_base = cm
  modified_base 92: mod_base = gm
  modified_base 93: mod_base = gm
  modified_base 94: mod_base = um
  modified_base 95: mod_base = gm
  modified_base 96: mod_base = cm
  modified_base 111: mod_base = OTHER; note = 2' fluoro modified base
  modified_base 112: mod_base = OTHER; note = 2' fluoro modified base
  modified_base 119: mod_base = um
  modified_base 120: mod_base = OTHER; note = Phosphorothioate (PS) linkage
  modified_base 120: mod_base = um
  modified_base 121: mod_base = OTHER; note = Phosphorothioate (PS) linkage
  modified_base 121: mod_base = um
  modified_base 122: mod_base = OTHER; note = Phosphorothioate (PS) linkage
  modified_base 122: mod_base = um
  source 1..122: mol_type = other RNA

SEQ ID NO: 1144 - RNA, 122 nt, synthetic construct; identical to SEQ ID NO: 37
  modified_base 1: mod_base = um
  modified_base 2: mod_base = OTHER; note = Phosphorothioate (PS) linkage
  modified_base 2: mod_base = um
  modified_base 3: mod_base = OTHER; note = Phosphorothioate (PS) linkage
  modified_base 3: mod_base = gm
  modified_base 4: mod_base = OTHER; note = Phosphorothioate (PS) linkage
  modified_base 29: mod_base = gm
  modified_base 30: mod_base = cm
  modified_base 31: mod_base = um
  modified_base 32: mod_base = OTHER; note = 2'-O-methyladenosine
  modified_base 33: mod_base = gm
  modified_base 34: mod_base = OTHER; note = 2'-O-methyladenosine
  modified_base 35: mod_base = OTHER; note = 2'-O-methyladenosine
  modified_base 36: mod_base = OTHER; note = 2'-O-methyladenosine
  modified_base 37: mod_base = um
  modified_base 38: mod_base = OTHER; note = 2'-O-methyladenosine
  modified_base 39: mod_base = gm
  modified_base 40: mod_base = cm
  modified_base 68: mod_base = OTHER; note = 2'-O-methyladenosine
  modified_base 69: mod_base = OTHER; note = 2'-O-methyladenosine
  modified_base 70: mod_base = cm
  modified_base 71: mod_base = um
  modified_base 72: mod_base = um
  modified_base 73: mod_base = gm
  modified_base 74: mod_base = OTHER; note = 2'-O-methyladenosine
  modified_base 75: mod_base = OTHER; note = 2'-O-methyladenosine
  modified_base 76: mod_base = OTHER; note = 2'-O-methyladenosine
  modified_base 77: mod_base = OTHER; note = 2'-O-methyladenosine
  modified_base 78: mod_base = OTHER; note = 2'-O-methyladenosine
  modified_base 79: mod_base = gm
  modified_base 80: mod_base = um
  modified_base 81: mod_base = gm
  modified_base 82: mod_base = gm
  modified_base 83: mod_base = cm
  modified_base 84: mod_base = OTHER; note = 2'-O-methyladenosine
  modified_base 85: mod_base = cm
  modified_base 86: mod_base = cm
  modified_base 87: mod_base = gm
  modified_base 88: mod_base = OTHER; note = 2'-O-methyladenosine
  modified_base 89: mod_base = gm
  modified_base 90: mod_base = um
  modified_base 91: mod_base = cm
  modified_base 92: mod_base = gm
  modified_base 93: mod_base = gm
  modified_base 94: mod_base = um
  modified_base 95: mod_base = gm
  modified_base 96: mod_base = cm
  modified_base 110: mod_base = OTHER; note = 2' fluoro modified base
  modified_base 111: mod_base = OTHER; note = 2' fluoro modified base
  modified_base 112: mod_base = OTHER; note = 2' fluoro modified base
  modified_base 114: mod_base = OTHER; note = 2' fluoro modified base
  modified_base 116: mod_base = OTHER; note = 2' fluoro modified base
  modified_base 117: mod_base = OTHER; note = 2' fluoro modified base
  modified_base 119: mod_base = um
  modified_base 120: mod_base = OTHER; note = Phosphorothioate (PS) linkage
  modified_base 120: mod_base = um
  modified_base 121: mod_base = OTHER; note = Phosphorothioate (PS) linkage
  modified_base 121: mod_base = um
  modified_base 122: mod_base = OTHER; note = Phosphorothioate (PS) linkage
  modified_base 122: mod_base = um
  source 1..122: mol_type = other RNA

SEQ ID NO: 1145 - RNA, 122 nt, synthetic construct; identical to SEQ ID NO: 37
  modified_base 1: mod_base = um
  modified_base 2: mod_base = OTHER; note = Phosphorothioate (PS) linkage
  modified_base 2: mod_base = um
  modified_base 3: mod_base = OTHER; note = Phosphorothioate (PS) linkage
  modified_base 3: mod_base = gm
  modified_base 4: mod_base = OTHER; note = Phosphorothioate (PS) linkage
  modified_base 29: mod_base = gm
  modified_base 30: mod_base = cm
  modified_base 31: mod_base = um
  modified_base 32: mod_base = OTHER; note = 2'-O-methyladenosine
  modified_base 33: mod_base = gm
  modified_base 34: mod_base = OTHER; note = 2'-O-methyladenosine
  modified_base 35: mod_base = OTHER; note = 2'-O-methyladenosine
  modified_base 36: mod_base = OTHER; note = 2'-O-methyladenosine
  modified_base 37: mod_base = um
  modified_base 38: mod_base = OTHER; note = 2'-O-methyladenosine
  modified_base 39: mod_base = gm
  modified_base 40: mod_base = cm
  modified_base 68: mod_base = OTHER; note = 2'-O-methyladenosine
  modified_base 69: mod_base = OTHER; note = 2'-O-methyladenosine
  modified_base 70: mod_base = cm
  modified_base 71: mod_base = um
  modified_base 72: mod_base = um
  modified_base 73: mod_base = gm
  modified_base 74: mod_base = OTHER; note = 2'-O-methyladenosine
  modified_base 75: mod_base = OTHER; note = 2'-O-methyladenosine
  modified_base 76: mod_base = OTHER; note = 2'-O-methyladenosine
  modified_base 77: mod_base = OTHER; note = 2'-O-methyladenosine
  modified_base 78: mod_base = OTHER; note = 2'-O-methyladenosine
  modified_base 79: mod_base = gm
  modified_base 80: mod_base = um
  modified_base 81: mod_base = gm
  modified_base 82: mod_base = gm
  modified_base 83: mod_base = cm
  modified_base 84: mod_base = OTHER; note = 2'-O-methyladenosine
  modified_base 85: mod_base = cm
  modified_base 86: mod_base = cm
  modified_base 87: mod_base = gm
  modified_base 88: mod_base = OTHER; note = 2'-O-methyladenosine
  modified_base 89: mod_base = gm
  modified_base 90: mod_base = um
  modified_base 91: mod_base = cm
  modified_base 92: mod_base = gm
  modified_base 93: mod_base = gm
  modified_base 94: mod_base = um
  modified_base 95: mod_base = gm
  modified_base 96: mod_base = cm
  modified_base 111: mod_base = OTHER; note = 2' fluoro modified base
  modified_base 112: mod_base = OTHER; note = 2' fluoro modified base
  modified_base 114: mod_base = OTHER; note = 2' fluoro modified base
  modified_base 116: mod_base = OTHER; note = 2' fluoro modified base
  modified_base 117: mod_base = OTHER; note = 2' fluoro modified base
  modified_base 119: mod_base = um
  modified_base 120: mod_base = OTHER; note = Phosphorothioate (PS) linkage
  modified_base 120: mod_base = um
  modified_base 121: mod_base = OTHER; note = Phosphorothioate (PS) linkage
  modified_base 121: mod_base = um
  modified_base 122: mod_base = OTHER; note = Phosphorothioate (PS) linkage
  modified_base 122: mod_base = um
  source 1..122: mol_type = other RNA

SEQ ID NO: 1146 - RNA, 122 nt, synthetic construct; identical to SEQ ID NO: 37
  modified_base 1: mod_base = um
  modified_base 2: mod_base = OTHER; note = Phosphorothioate (PS) linkage
  modified_base 2: mod_base = um
  modified_base 3: mod_base = OTHER; note = Phosphorothioate (PS) linkage
  modified_base 3: mod_base = gm
  modified_base 4: mod_base = OTHER; note = Phosphorothioate (PS) linkage
  modified_base 29: mod_base = gm
  modified_base 30: mod_base = cm
  modified_base 31: mod_base = um
  modified_base 32: mod_base = OTHER; note = 2'-O-methyladenosine
  modified_base 33: mod_base = gm
  modified_base 34: mod_base = OTHER; note = 2'-O-methyladenosine
  modified_base 35: mod_base = OTHER; note = 2'-O-methyladenosine
  modified_base 36: mod_base = OTHER; note = 2'-O-methyladenosine
  modified_base 37: mod_base = um
  modified_base 38: mod_base = OTHER; note = 2'-O-methyladenosine
  modified_base 39: mod_base = gm
  modified_base 40: mod_base = cm
  modified_base 68: mod_base = OTHER; note = 2'-O-methyladenosine
  modified_base 69: mod_base = OTHER; note = 2'-O-methyladenosine
  modified_base 70: mod_base = cm
  modified_base 71: mod_base = um
  modified_base 72: mod_base = um
  modified_base 73: mod_base = gm
  modified_base 74: mod_base = OTHER; note = 2'-O-methyladenosine
  modified_base 75: mod_base = OTHER; note = 2'-O-methyladenosine
  modified_base 76: mod_base = OTHER; note = 2'-O-methyladenosine
  modified_base 77: mod_base = OTHER; note = 2'-O-methyladenosine
  modified_base 78: mod_base = OTHER; note = 2'-O-methyladenosine
  modified_base 79: mod_base = gm
  modified_base 80: mod_base = um
  modified_base 81: mod_base = gm
  modified_base 82: mod_base = gm
  modified_base 83: mod_base = cm
  modified_base 84: mod_base = OTHER; note = 2'-O-methyladenosine
  modified_base 85: mod_base = cm
  modified_base 86: mod_base = cm
  modified_base 87: mod_base = gm
  modified_base 88: mod_base = OTHER; note = 2'-O-methyladenosine
  modified_base 89: mod_base = gm
  modified_base 90: mod_base = um
  modified_base 91: mod_base = cm
  modified_base 92: mod_base = gm
  modified_base 93: mod_base = gm
  modified_base 94: mod_base = um
  modified_base 95: mod_base = gm
  modified_base 96: mod_base = cm
  modified_base 111: mod_base = OTHER; note = 2' fluoro modified base
  modified_base 116: mod_base = OTHER; note = 2' fluoro modified base
  modified_base 118: mod_base = cm
  modified_base 119: mod_base = um
  modified_base 120: mod_base = OTHER; note = Phosphorothioate (PS) linkage
  modified_base 120: mod_base = um
  modified_base 121: mod_base = OTHER; note = Phosphorothioate (PS) linkage
  modified_base 121: mod_base = um
  modified_base 122: mod_base = OTHER; note = Phosphorothioate (PS) linkage
  modified_base 122: mod_base = um
  source 1..122: mol_type = other RNA

SEQ ID NO: 1147 - RNA, 122 nt, synthetic construct; identical to SEQ ID NO: 37
  modified_base 1: mod_base = um
  modified_base 2: mod_base = OTHER; note = Phosphorothioate (PS) linkage
  modified_base 2: mod_base = um
  modified_base 3: mod_base = OTHER; note = Phosphorothioate (PS) linkage
  modified_base 3: mod_base = gm
  modified_base 4: mod_base = OTHER; note = Phosphorothioate (PS) linkage
  modified_base 29: mod_base = gm
  modified_base 30: mod_base = cm
  modified_base 31: mod_base = um
  modified_base 32: mod_base = OTHER; note = 2'-O-methyladenosine
  modified_base 33: mod_base = gm
  modified_base 34: mod_base = OTHER; note = 2'-O-methyladenosine
  modified_base 35: mod_base = OTHER; note = 2'-O-methyladenosine
  modified_base 36: mod_base = OTHER; note = 2'-O-methyladenosine
  modified_base 37: mod_base = um
  modified_base 38: mod_base = OTHER; note = 2'-O-methyladenosine
  modified_base 39: mod_base = gm
  modified_base 40: mod_base = cm
  modified_base 68: mod_base = OTHER; note = 2'-O-methyladenosine
  modified_base 69: mod_base = OTHER; note = 2'-O-methyladenosine
  modified_base 70: mod_base = cm
  modified_base 71: mod_base = um
  modified_base 72: mod_base = um
  modified_base 73: mod_base = gm
  modified_base 74: mod_base = OTHER; note = 2'-O-methyladenosine
  modified_base 75: mod_base = OTHER; note = 2'-O-methyladenosine
  modified_base 76: mod_base = OTHER; note = 2'-O-methyladenosine
  modified_base 77: mod_base = OTHER; note = 2'-O-methyladenosine
  modified_base 78: mod_base = OTHER; note = 2'-O-methyladenosine
  modified_base 79: mod_base = gm
  modified_base 80: mod_base = um
  modified_base 81: mod_base = gm
  modified_base 82: mod_base = gm
  modified_base 83: mod_base = cm
  modified_base 84: mod_base = OTHER; note = 2'-O-methyladenosine
  modified_base 85: mod_base = cm
  modified_base 86: mod_base = cm
  modified_base 87: mod_base = gm
  modified_base 88: mod_base = OTHER; note = 2'-O-methyladenosine
  modified_base 89: mod_base = gm
  modified_base 90: mod_base = um
  modified_base 91: mod_base = cm
  modified_base 92: mod_base = gm
  modified_base 93: mod_base = gm
  modified_base 94: mod_base = um
  modified_base 95: mod_base = gm
  modified_base 96: mod_base = cm
  modified_base 111: mod_base = OTHER; note = 2' fluoro modified base
  modified_base 116: mod_base = OTHER; note = 2' fluoro modified base
  modified_base 117: mod_base = gm
  modified_base 118: mod_base = cm
  modified_base 119: mod_base = um
  modified_base 120: mod_base = OTHER; note = Phosphorothioate (PS) linkage
  modified_base 120: mod_base = um
  modified_base 121: mod_base = OTHER; note = Phosphorothioate (PS) linkage
  modified_base 121: mod_base = um
  modified_base 122: mod_base = OTHER; note = Phosphorothioate (PS) linkage
  modified_base 122: mod_base = um
  source 1..122: mol_type = other RNA

SEQ ID NO: 1148 - RNA, 122 nt, synthetic construct; identical to SEQ ID NO: 37
  modified_base 1: mod_base = um
  modified_base 2: mod_base = OTHER; note = Phosphorothioate (PS) linkage
  modified_base 2: mod_base = um
  modified_base 3: mod_base = OTHER; note = Phosphorothioate (PS) linkage
  modified_base 3: mod_base = gm
  modified_base 4: mod_base = OTHER; note = Phosphorothioate (PS) linkage
  modified_base 29: mod_base = gm
  modified_base 30: mod_base = cm
  modified_base 31: mod_base = um
  modified_base 32: mod_base = OTHER; note = 2'-O-methyladenosine
  modified_base 33: mod_base = gm
  modified_base 34: mod_base = OTHER; note = 2'-O-methyladenosine
  modified_base 35: mod_base = OTHER; note = 2'-O-methyladenosine
  modified_base 36: mod_base = OTHER; note = 2'-O-methyladenosine
  modified_base 37: mod_base = um
  modified_base 38: mod_base = OTHER; note = 2'-O-methyladenosine
  modified_base 39: mod_base = gm
  modified_base 40: mod_base = cm
  modified_base 68: mod_base = OTHER; note = 2'-O-methyladenosine
  modified_base 69: mod_base = OTHER; note = 2'-O-methyladenosine
  modified_base 70: mod_base = cm
  modified_base 71: mod_base = um
  modified_base 72: mod_base = um
  modified_base 73: mod_base = gm
  modified_base 74: mod_base = OTHER; note = 2'-O-methyladenosine
  modified_base 75: mod_base = OTHER; note = 2'-O-methyladenosine
  modified_base 76: mod_base = OTHER; note = 2'-O-methyladenosine
  modified_base 77: mod_base = OTHER; note = 2'-O-methyladenosine
  modified_base 78: mod_base = OTHER; note = 2'-O-methyladenosine
  modified_base 79: mod_base = gm
  modified_base 80: mod_base = um
  modified_base 81: mod_base = gm
  modified_base 82: mod_base = gm
  modified_base 83: mod_base = cm
  modified_base 84: mod_base = OTHER; note = 2'-O-methyladenosine
  modified_base 85: mod_base = cm
  modified_base 86: mod_base = cm
  modified_base 87: mod_base = gm
  modified_base 88: mod_base = OTHER; note = 2'-O-methyladenosine
  modified_base 89: mod_base = gm
  modified_base 90: mod_base = um
  modified_base 91: mod_base = cm
  modified_base 92: mod_base = gm
  modified_base 93: mod_base = gm
  modified_base 94: mod_base = um
  modified_base 95: mod_base = gm
  modified_base 96: mod_base = cm
  modified_base 111: mod_base = OTHER; note = 2' fluoro modified base
  modified_base 115: mod_base = um
  modified_base 116: mod_base = OTHER; note = 2' fluoro modified base
  modified_base 117: mod_base = gm
  modified_base 118: mod_base = cm
  modified_base 119: mod_base = um
  modified_base 120: mod_base = OTHER; note = Phosphorothioate (PS) linkage
  modified_base 120: mod_base = um
  modified_base 121: mod_base = OTHER; note = Phosphorothioate (PS) linkage
  modified_base 121: mod_base = um
  modified_base 122: mod_base = OTHER; note = Phosphorothioate (PS) linkage
  modified_base 122: mod_base = um
  source 1..122: mol_type = other RNA

SEQ ID NO: 1149 - RNA, 122 nt, synthetic construct; identical to SEQ ID NO: 37
  modified_base 1: mod_base = um
  modified_base 2: mod_base = OTHER; note = Phosphorothioate (PS) linkage
  modified_base 2: mod_base = um
  modified_base 3: mod_base = OTHER; note = Phosphorothioate (PS) linkage
  modified_base 3: mod_base = gm
  modified_base 4: mod_base = OTHER; note = Phosphorothioate (PS) linkage
  modified_base 29: mod_base = gm
  modified_base 30: mod_base = cm
  modified_base 31: mod_base = um
  modified_base 32: mod_base = OTHER; note = 2'-O-methyladenosine
  modified_base 33: mod_base = gm
  modified_base 34: mod_base = OTHER; note = 2'-O-methyladenosine
  modified_base 35: mod_base = OTHER; note = 2'-O-methyladenosine
  modified_base 36: mod_base = OTHER; note = 2'-O-methyladenosine
  modified_base 37: mod_base = um
  modified_base 38: mod_base = OTHER; note = 2'-O-methyladenosine
  modified_base 39: mod_base = gm
  modified_base 40: mod_base = cm
  modified_base 68: mod_base = OTHER; note = 2'-O-methyladenosine
  modified_base 69: mod_base = OTHER; note = 2'-O-methyladenosine
  modified_base 70: mod_base = cm
  modified_base 71: mod_base = um
  modified_base 72: mod_base = um
  modified_base 73: mod_base = gm
  modified_base 74: mod_base = OTHER; note = 2'-O-methyladenosine
  modified_base 75: mod_base = OTHER; note = 2'-O-methyladenosine
  modified_base 76: mod_base = OTHER; note = 2'-O-methyladenosine
  modified_base 77: mod_base = OTHER; note = 2'-O-methyladenosine
  modified_base 78: mod_base = OTHER; note = 2'-O-methyladenosine
  modified_base 79: mod_base = gm
  modified_base 80: mod_base = um
  modified_base 81: mod_base = gm
  modified_base 82: mod_base = gm
  modified_base 83: mod_base = cm
  modified_base 84: mod_base = OTHER; note = 2'-O-methyladenosine
  modified_base 85: mod_base = cm
  modified_base 86: mod_base = cm
  modified_base 87: mod_base = gm
  modified_base 88: mod_base = OTHER; note = 2'-O-methyladenosine
  modified_base 89: mod_base = gm
  modified_base 90: mod_base = um
  modified_base 91: mod_base = cm
  modified_base 92: mod_base = gm
  modified_base 93: mod_base = gm
  modified_base 94: mod_base = um
  modified_base 95: mod_base = gm
  modified_base 96: mod_base = cm
  modified_base 111: mod_base = OTHER; note = 2' fluoro modified base
  modified_base 114: mod_base = gm
  modified_base 115: mod_base = um
  modified_base 116: mod_base = OTHER; note = 2' fluoro modified base
  modified_base 117: mod_base = gm
  modified_base 118: mod_base = cm
  modified_base 119: mod_base = um
  modified_base 120: mod_base = OTHER; note = Phosphorothioate (PS) linkage
  modified_base 120: mod_base = um
  modified_base 121: mod_base = OTHER; note = Phosphorothioate (PS) linkage
  modified_base 121: mod_base = um
  modified_base 122: mod_base = OTHER; note = Phosphorothioate (PS) linkage
  modified_base 122: mod_base = um
  source 1..122: mol_type = other RNA

SEQ ID NO: 1150 - RNA, 122 nt, synthetic construct; identical to SEQ ID NO: 37
  modified_base 1: mod_base = um
  modified_base 2: mod_base = OTHER; note = Phosphorothioate (PS) linkage
  modified_base 2: mod_base = um
  modified_base 3: mod_base = OTHER; note = Phosphorothioate (PS) linkage
  modified_base 3: mod_base = gm
  modified_base 4: mod_base = OTHER; note = Phosphorothioate (PS) linkage
  modified_base 29: mod_base = gm
  modified_base 30: mod_base = cm
  modified_base 31: mod_base = um
  modified_base 32: mod_base = OTHER; note = 2'-O-methyladenosine
  modified_base 33: mod_base = gm
  modified_base 34: mod_base = OTHER; note = 2'-O-methyladenosine
  modified_base 35: mod_base = OTHER; note = 2'-O-methyladenosine
  modified_base 36: mod_base = OTHER; note = 2'-O-methyladenosine
  modified_base 37: mod_base = um
  modified_base 38: mod_base = OTHER; note = 2'-O-methyladenosine
  modified_base 39: mod_base = gm
  modified_base 40: mod_base = cm
  modified_base 68: mod_base = OTHER; note = 2'-O-methyladenosine
  modified_base 69: mod_base = OTHER; note = 2'-O-methyladenosine
  modified_base 70: mod_base = cm
  modified_base 71: mod_base = um
  modified_base 72: mod_base = um
  modified_base 73: mod_base = gm
  modified_base 74: mod_base = OTHER; note = 2'-O-methyladenosine
  modified_base 75: mod_base = OTHER; note = 2'-O-methyladenosine
  modified_base 76: mod_base = OTHER; note = 2'-O-methyladenosine
  modified_base 77: mod_base = OTHER; note = 2'-O-methyladenosine
  modified_base 78: mod_base = OTHER; note = 2'-O-methyladenosine
  modified_base 79: mod_base = gm
  modified_base 80: mod_base = um
  modified_base 81: mod_base = gm
  modified_base 82: mod_base = gm
  modified_base 83: mod_base = cm
  modified_base 84: mod_base = OTHER; note = 2'-O-methyladenosine
  modified_base 85: mod_base = cm
  modified_base 86: mod_base = cm
  modified_base 87: mod_base = gm
  modified_base 88: mod_base = OTHER; note = 2'-O-methyladenosine
  modified_base 89: mod_base = gm
  modified_base 90: mod_base = um
  modified_base 91: mod_base = cm
  modified_base 92: mod_base = gm
  modified_base 93: mod_base = gm
  modified_base 94: mod_base = um
  modified_base 95: mod_base = gm
  modified_base 96: mod_base = cm
  modified_base 111: mod_base = OTHER; note = 2' fluoro modified base
  modified_base 113: mod_base = cm
  modified_base 114: mod_base = gm
  modified_base 115: mod_base = um
  modified_base 116: mod_base = OTHER; note = 2' fluoro modified base
  modified_base 117: mod_base = gm
  modified_base 118: mod_base = cm
  modified_base 119: mod_base = um
  modified_base 120: mod_base = OTHER; note = Phosphorothioate (PS) linkage
  modified_base 120: mod_base = um
  modified_base 121: mod_base = OTHER; note = Phosphorothioate (PS) linkage
  modified_base 121: mod_base = um
  modified_base 122: mod_base = OTHER; note = Phosphorothioate (PS) linkage
  modified_base 122: mod_base = um
  source 1..122: mol_type = other RNA

SEQ ID NO: 1151 - RNA, 122 nt, synthetic construct; identical to SEQ ID NO: 37
  modified_base 1: mod_base = um
  modified_base 2: mod_base = OTHER; note = Phosphorothioate (PS) linkage
  modified_base 2: mod_base = um
  modified_base 3: mod_base = OTHER; note = Phosphorothioate (PS) linkage
  modified_base 3: mod_base = gm
  modified_base 4: mod_base = OTHER; note = Phosphorothioate (PS) linkage
  modified_base 29: mod_base = gm
  modified_base 30: mod_base = cm
  modified_base 31: mod_base = um
  modified_base 32: mod_base = OTHER; note = 2'-O-methyladenosine
  modified_base 33: mod_base = gm
  modified_base 34: mod_base = OTHER; note = 2'-O-methyladenosine
  modified_base 35: mod_base = OTHER; note = 2'-O-methyladenosine
  modified_base 36: mod_base = OTHER; note = 2'-O-methyladenosine
  modified_base 37: mod_base = um
  modified_base 38: mod_base = OTHER; note = 2'-O-methyladenosine
  modified_base 39: mod_base = gm
  modified_base 40: mod_base = cm
  modified_base 68: mod_base = OTHER; note = 2'-O-methyladenosine
  modified_base 69: mod_base = OTHER; note = 2'-O-methyladenosine
  modified_base 70: mod_base = cm
  modified_base 71: mod_base = um
  modified_base 72: mod_base = um
  modified_base 73: mod_base = gm
  modified_base 74: mod_base = OTHER; note = 2'-O-methyladenosine
  modified_base 75: mod_base = OTHER; note = 2'-O-methyladenosine
  modified_base 76: mod_base = OTHER; note = 2'-O-methyladenosine
  modified_base 77: mod_base = OTHER; note = 2'-O-methyladenosine
  modified_base 78: mod_base = OTHER; note = 2'-O-methyladenosine
  modified_base 79: mod_base = gm
  modified_base 80: mod_base = um
  modified_base 81: mod_base = gm
  modified_base 82: mod_base = gm
  modified_base 83: mod_base = cm
  modified_base 84: mod_base = OTHER; note = 2'-O-methyladenosine
  modified_base 85: mod_base = cm
  modified_base 86: mod_base = cm
  modified_base 87: mod_base = gm
  modified_base 88: mod_base = OTHER; note = 2'-O-methyladenosine
  modified_base 89: mod_base = gm
  modified_base 90: mod_base = um
  modified_base 91: mod_base = cm
  modified_base 92: mod_base = gm
  modified_base 93: mod_base = gm
  modified_base 94: mod_base = um
  modified_base 95: mod_base = gm
  modified_base 96: mod_base = cm
  modified_base 111: mod_base = OTHER; note = 2' fluoro modified base
  modified_base 112: mod_base = gm
  modified_base 113: mod_base = cm
  modified_base 114: mod_base = gm
  modified_base 115: mod_base = um
  modified_base 116: mod_base = OTHER; note = 2' fluoro modified base
  modified_base 117: mod_base = gm
  modified_base 118: mod_base = cm
  modified_base 119: mod_base = um
  modified_base 120: mod_base = OTHER; note = Phosphorothioate (PS) linkage
  modified_base 120: mod_base = um
  modified_base 121: mod_base = OTHER; note = Phosphorothioate (PS) linkage
  modified_base 121: mod_base = um
  modified_base 122: mod_base = OTHER; note = Phosphorothioate (PS) linkage
  modified_base 122: mod_base = um
  source 1..122: mol_type = other RNA

SEQ ID NO: 1152 - RNA, 122 nt, synthetic construct; identical to SEQ ID NO: 37
  modified_base 1: mod_base = um
  modified_base 2: mod_base = OTHER; note = Phosphorothioate (PS) linkage
  modified_base 2: mod_base = um
  modified_base 3: mod_base = OTHER; note = Phosphorothioate (PS) linkage
  modified_base 3: mod_base = gm
  modified_base 4: mod_base = OTHER; note = Phosphorothioate (PS) linkage
  modified_base 29: mod_base = gm
  modified_base 30: mod_base = cm
  modified_base 31: mod_base = um
  modified_base 32: mod_base = OTHER; note = 2'-O-methyladenosine
  modified_base 33: mod_base = gm
  modified_base 34: mod_base = OTHER; note = 2'-O-methyladenosine
  modified_base 35: mod_base = OTHER; note = 2'-O-methyladenosine
  modified_base 36: mod_base = OTHER; note = 2'-O-methyladenosine
  modified_base 37: mod_base = um
  modified_base 38: mod_base = OTHER; note = 2'-O-methyladenosine
  modified_base 39: mod_base = gm
  modified_base 40: mod_base = cm
  modified_base 68: mod_base = OTHER; note = 2'-O-methyladenosine
  modified_base 69: mod_base = OTHER; note = 2'-O-methyladenosine
  modified_base 70: mod_base = cm
  modified_base 71: mod_base = um
  modified_base 72: mod_base = um
  modified_base 73: mod_base = gm
  modified_base 74: mod_base = OTHER; note = 2'-O-methyladenosine
  modified_base 75: mod_base = OTHER; note = 2'-O-methyladenosine
  modified_base 76: mod_base = OTHER; note = 2'-O-methyladenosine
  modified_base 77: mod_base = OTHER; note = 2'-O-methyladenosine
  modified_base 78: mod_base = OTHER; note = 2'-O-methyladenosine
  modified_base 79: mod_base = gm
  modified_base 80: mod_base = um
  modified_base 81: mod_base = gm
  modified_base 82: mod_base = gm
  modified_base 83: mod_base = cm
  modified_base 84: mod_base = OTHER; note = 2'-O-methyladenosine
  modified_base 85: mod_base = cm
  modified_base 86: mod_base = cm
  modified_base 87: mod_base = gm
  modified_base 88: mod_base = OTHER; note = 2'-O-methyladenosine
  modified_base 89: mod_base = gm
  modified_base 90: mod_base = um
  modified_base 91: mod_base = cm
  modified_base 92: mod_base = gm
  modified_base 93: mod_base = gm
  modified_base 94: mod_base = um
  modified_base 95: mod_base = gm
  modified_base 96: mod_base = cm
  modified_base 111: mod_base = OTHER; note = 2' fluoro modified base
  modified_base 116: mod_base = OTHER; note = 2' fluoro modified base
  modified_base 117: mod_base = gm
  modified_base 119: mod_base = um
  modified_base 120: mod_base = OTHER; note = Phosphorothioate (PS) linkage
  modified_base 120: mod_base = um
  modified_base 121: mod_base = OTHER; note = Phosphorothioate (PS) linkage
  modified_base 121: mod_base = um
  modified_base 122: mod_base = OTHER; note = Phosphorothioate (PS) linkage
  modified_base 122: mod_base = um
  source 1..122: mol_type = other RNA

SEQ ID NO: 1153 - RNA, 122 nt, synthetic construct; identical to SEQ ID NO: 37
  modified_base 1: mod_base = um
  modified_base 2: mod_base = OTHER; note = Phosphorothioate (PS) linkage
  modified_base 2: mod_base = um
  modified_base 3: mod_base = OTHER; note = Phosphorothioate (PS) linkage
  modified_base 3: mod_base = gm
  modified_base 4: mod_base = OTHER; note = Phosphorothioate (PS) linkage
  modified_base 29: mod_base = gm
  modified_base 30: mod_base = cm
  modified_base 31: mod_base = um
  modified_base 32: mod_base = OTHER; note = 2'-O-methyladenosine
  modified_base 33: mod_base = gm
  modified_base 34: mod_base = OTHER; note = 2'-O-methyladenosine
  modified_base 35: mod_base = OTHER; note = 2'-O-methyladenosine
  modified_base 36: mod_base = OTHER; note = 2'-O-methyladenosine
  modified_base 37: mod_base = um
  modified_base 38: mod_base = OTHER; note = 2'-O-methyladenosine
  modified_base 39: mod_base = gm
  modified_base 40: mod_base = cm
  modified_base 68: mod_base = OTHER; note = 2'-O-methyladenosine
  modified_base 69: mod_base = OTHER; note = 2'-O-methyladenosine
  modified_base 70: mod_base = cm
  modified_base 71: mod_base = um
  modified_base 72: mod_base = um
  modified_base 73: mod_base = gm
  modified_base 74: mod_base = OTHER; note = 2'-O-methyladenosine
  modified_base 75: mod_base = OTHER; note = 2'-O-methyladenosine
  modified_base 76: mod_base = OTHER; note = 2'-O-methyladenosine
  modified_base 77: mod_base = OTHER; note = 2'-O-methyladenosine
  modified_base 78: mod_base = OTHER; note = 2'-O-methyladenosine
  modified_base 79: mod_base = gm
  modified_base 80: mod_base = um
  modified_base 81: mod_base = gm
  modified_base 82: mod_base = gm
  modified_base 83: mod_base = cm
  modified_base 84: mod_base = OTHER; note = 2'-O-methyladenosine
  modified_base 85: mod_base = cm
  modified_base 86: mod_base = cm
  modified_base 87: mod_base = gm
  modified_base 88: mod_base = OTHER; note = 2'-O-methyladenosine
  modified_base 89: mod_base = gm
  modified_base 90: mod_base = um
  modified_base 91: mod_base = cm
  modified_base 92: mod_base = gm
  modified_base 93: mod_base = gm
  modified_base 94: mod_base = um
  modified_base 95: mod_base = gm
  modified_base 96: mod_base = cm
  modified_base 111: mod_base = OTHER; note = 2' fluoro modified base
  modified_base 115: mod_base = um
  modified_base 116: mod_base = OTHER; note = 2' fluoro modified base
  modified_base 119: mod_base = um
  modified_base 120: mod_base = OTHER; note = Phosphorothioate (PS) linkage
  modified_base 120: mod_base = um
  modified_base 121: mod_base = OTHER; note = Phosphorothioate (PS) linkage
  modified_base 121: mod_base = um
  modified_base 122: mod_base = OTHER; note = Phosphorothioate (PS) linkage
  modified_base 122: mod_base = um
  source 1..122: mol_type = other RNA

SEQ ID NO: 1154 - RNA, 122 nt, synthetic construct; identical to SEQ ID NO: 37
  modified_base 1: mod_base = um
  modified_base 2: mod_base = OTHER; note = Phosphorothioate (PS) linkage
  modified_base 2: mod_base = um
  modified_base 3: mod_base = OTHER; note = Phosphorothioate (PS) linkage
  modified_base 3: mod_base = gm
  modified_base 4: mod_base = OTHER; note = Phosphorothioate (PS) linkage
  modified_base 29: mod_base = gm
  modified_base 30: mod_base = cm
  modified_base 31: mod_base = um
  modified_base 32: mod_base = OTHER; note = 2'-O-methyladenosine
  modified_base 33: mod_base = gm
  modified_base 34: mod_base = OTHER; note = 2'-O-methyladenosine
  modified_base 35: mod_base = OTHER; note = 2'-O-methyladenosine
  modified_base 36: mod_base = OTHER; note = 2'-O-methyladenosine
  modified_base 37: mod_base = um
  modified_base 38: mod_base = OTHER; note = 2'-O-methyladenosine
  modified_base 39: mod_base = gm
  modified_base 40: mod_base = cm
  modified_base 68: mod_base = OTHER; note = 2'-O-methyladenosine
  modified_base 69: mod_base = OTHER; note = 2'-O-methyladenosine
  modified_base 70: mod_base = cm
  modified_base 71: mod_base = um
  modified_base 72: mod_base = um
  modified_base 73: mod_base = gm
  modified_base 74: mod_base = OTHER; note = 2'-O-methyladenosine
  modified_base 75: mod_base = OTHER; note = 2'-O-methyladenosine
  modified_base 76: mod_base = OTHER; note = 2'-O-methyladenosine
  modified_base 77: mod_base = OTHER; note = 2'-O-methyladenosine
  modified_base 78: mod_base = OTHER; note = 2'-O-methyladenosine
  modified_base 79: mod_base = gm
  modified_base 80: mod_base = um
  modified_base 81: mod_base = gm
  modified_base 82: mod_base = gm
  modified_base 83: mod_base = cm
  modified_base 84: mod_base = OTHER; note = 2'-O-methyladenosine
  modified_base 85: mod_base = cm
  modified_base 86: mod_base = cm
  modified_base 87: mod_base = gm
  modified_base 88: mod_base = OTHER; note = 2'-O-methyladenosine
  modified_base 89: mod_base = gm
  modified_base 90: mod_base = um
  modified_base 91: mod_base = cm
  modified_base 92: mod_base = gm
  modified_base 93: mod_base = gm
  modified_base 94: mod_base = um
  modified_base 95: mod_base = gm
  modified_base 96: mod_base = cm
  modified_base 111: mod_base = OTHER; note = 2' fluoro modified base
  modified_base 114: mod_base = gm
  modified_base 116: mod_base = OTHER; note = 2' fluoro modified base
  modified_base 119: mod_base = um
  modified_base 120: mod_base = OTHER; note = Phosphorothioate (PS) linkage
  modified_base 120: mod_base = um
  modified_base 121: mod_base = OTHER; note = Phosphorothioate (PS) linkage
  modified_base 121: mod_base = um
  modified_base 122: mod_base = OTHER; note = Phosphorothioate (PS) linkage
  modified_base 122: mod_base = um
  source 1..122: mol_type = other RNA

SEQ ID NO: 1155 - RNA, 122 nt, synthetic construct; identical to SEQ ID NO: 37
  modified_base 1: mod_base = um
  modified_base 2: mod_base = OTHER; note = Phosphorothioate (PS) linkage
  modified_base 2: mod_base = um
  modified_base 3: mod_base = OTHER; note = Phosphorothioate (PS) linkage
  modified_base 3: mod_base = gm
  modified_base 4: mod_base = OTHER; note = Phosphorothioate (PS) linkage
  modified_base 29: mod_base = gm
  modified_base 30: mod_base = cm
  modified_base 31: mod_base = um
  modified_base 32: mod_base = OTHER; note = 2'-O-methyladenosine
  modified_base 33: mod_base = gm
  modified_base 34: mod_base = OTHER; note = 2'-O-methyladenosine
  modified_base 35: mod_base = OTHER; note = 2'-O-methyladenosine
  modified_base 36: mod_base = OTHER; note = 2'-O-methyladenosine
  modified_base 37: mod_base = um
  modified_base 38: mod_base = OTHER; note = 2'-O-methyladenosine
  modified_base 39: mod_base = gm
  modified_base 40: mod_base = cm
  modified_base 68: mod_base = OTHER; note = 2'-O-methyladenosine
  modified_base 69: mod_base = OTHER; note = 2'-O-methyladenosine
  modified_base 70: mod_base = cm
  modified_base 71: mod_base = um
  modified_base 72: mod_base = um
  modified_base 73: mod_base = gm
  modified_base 74: mod_base = OTHER; note = 2'-O-methyladenosine
  modified_base 75: mod_base = OTHER; note = 2'-O-methyladenosine
  modified_base 76: mod_base = OTHER; note = 2'-O-methyladenosine
  modified_base 77: mod_base = OTHER; note = 2'-O-methyladenosine
  modified_base 78: mod_base = OTHER; note = 2'-O-methyladenosine
  modified_base 79: mod_base = gm
  modified_base 80: mod_base = um
  modified_base 81: mod_base = gm
  modified_base 82: mod_base = gm
  modified_base 83: mod_base = cm
  modified_base 84: mod_base = OTHER; note = 2'-O-methyladenosine
  modified_base 85: mod_base = cm
  modified_base 86: mod_base = cm
  modified_base 87: mod_base = gm
  modified_base 88: mod_base = OTHER; note = 2'-O-methyladenosine
  modified_base 89: mod_base = gm
  modified_base 90: mod_base = um
  modified_base 91: mod_base = cm
  modified_base 92: mod_base = gm
  modified_base 93: mod_base = gm
  modified_base 94: mod_base = um
  modified_base 95: mod_base = gm
  modified_base 96: mod_base = cm
  modified_base 111: mod_base = OTHER; note = 2' fluoro modified base
  modified_base 113: mod_base = cm
  modified_base 116: mod_base = OTHER; note = 2' fluoro modified base
  modified_base 119: mod_base = um
  modified_base 120: mod_base = OTHER; note = Phosphorothioate (PS) linkage
  modified_base 120: mod_base = um
  modified_base 121: mod_base = OTHER; note = Phosphorothioate (PS) linkage
  modified_base 121: mod_base = um
  modified_base 122: mod_base = OTHER; note = Phosphorothioate (PS) linkage
  modified_base 122: mod_base = um
  source 1..122: mol_type = other RNA

SEQ ID NO: 1156 - RNA, 122 nt, synthetic construct; identical to SEQ ID NO: 37
  modified_base 1: mod_base = um
  modified_base 2: mod_base = OTHER; note = Phosphorothioate (PS) linkage
  modified_base 2: mod_base = um
  modified_base 3: mod_base = OTHER; note = Phosphorothioate (PS) linkage
  modified_base 3: mod_base = gm
  modified_base 4: mod_base = OTHER; note = Phosphorothioate (PS) linkage
  modified_base 29: mod_base = gm
  modified_base 30: mod_base = cm
  modified_base 31: mod_base = um
  modified_base 32: mod_base = OTHER; note = 2'-O-methyladenosine
  modified_base 33: mod_base = gm
  modified_base 34: mod_base = OTHER; note = 2'-O-methyladenosine
  modified_base 35: mod_base = OTHER; note = 2'-O-methyladenosine
  modified_base 36: mod_base = OTHER; note = 2'-O-methyladenosine
  modified_base 37: mod_base = um
  modified_base 38: mod_base = OTHER; note = 2'-O-methyladenosine
  modified_base 39: mod_base = gm
  modified_base 40: mod_base = cm
  modified_base 68: mod_base = OTHER; note = 2'-O-methyladenosine
  modified_base 69: mod_base = OTHER; note = 2'-O-methyladenosine
  modified_base 70: mod_base = cm
  modified_base 71: mod_base = um
  modified_base 72: mod_base = um
  modified_base 73: mod_base = gm
  modified_base 74: mod_base = OTHER; note = 2'-O-methyladenosine
  modified_base 75: mod_base = OTHER; note = 2'-O-methyladenosine
  modified_base 76: mod_base = OTHER; note = 2'-O-methyladenosine
  modified_base 77: mod_base = OTHER; note = 2'-O-methyladenosine
  modified_base 78: mod_base = OTHER; note = 2'-O-methyladenosine
  modified_base 79: mod_base = gm
  modified_base 80: mod_base = um
  modified_base 81: mod_base = gm
  modified_base 82: mod_base = gm
  modified_base 83: mod_base = cm
  modified_base 84: mod_base = OTHER; note = 2'-O-methyladenosine
  modified_base 85: mod_base = cm
  modified_base 86: mod_base = cm
  modified_base 87: mod_base = gm
  modified_base 88: mod_base = OTHER; note = 2'-O-methyladenosine
  modified_base 89: mod_base = gm
  modified_base 90: mod_base = um
  modified_base 91: mod_base = cm
  modified_base 92: mod_base = gm
  modified_base 93: mod_base = gm
  modified_base 94: mod_base = um
  modified_base 95: mod_base = gm
  modified_base 96: mod_base = cm
  modified_base 111: mod_base = OTHER; note = 2' fluoro modified base
  modified_base 112: mod_base = gm
  modified_base 116: mod_base = OTHER; note = 2' fluoro modified base
  modified_base 119: mod_base = um
  modified_base 120: mod_base = OTHER; note = Phosphorothioate (PS) linkage
  modified_base 120: mod_base = um
  modified_base 121: mod_base = OTHER; note = Phosphorothioate (PS) linkage
  modified_base 121: mod_base = um
  modified_base 122: mod_base = OTHER; note = Phosphorothioate (PS) linkage
  modified_base 122: mod_base = um
  source 1..122: mol_type = other RNA

SEQ ID NO: 1157 - RNA, 122 nt, synthetic construct; identical to SEQ ID NO: 37
  modified_base 1: mod_base = um
  modified_base 2: mod_base = OTHER; note = Phosphorothioate (PS) linkage
  modified_base 2: mod_base = um
  modified_base 3: mod_base = OTHER; note = Phosphorothioate (PS) linkage
  modified_base 3: mod_base = gm
  modified_base 4: mod_base = OTHER; note = Phosphorothioate (PS) linkage
  modified_base 29: mod_base = gm
  modified_base 30: mod_base = cm
  modified_base 31: mod_base = um
  modified_base 32: mod_base = OTHER; note = 2'-O-methyladenosine
  modified_base 33: mod_base = gm
  modified_base 34: mod_base = OTHER; note = 2'-O-methyladenosine
  modified_base 35: mod_base = OTHER; note = 2'-O-methyladenosine
  modified_base 36: mod_base = OTHER; note = 2'-O-methyladenosine
  modified_base 37: mod_base = um
  modified_base 38: mod_base = OTHER; note = 2'-O-methyladenosine
  modified_base 39: mod_base = gm
  modified_base 40: mod_base = cm
  modified_base 68: mod_base = OTHER; note = 2'-O-methyladenosine
  modified_base 69: mod_base = OTHER; note = 2'-O-methyladenosine
  modified_base 70: mod_base = cm
  modified_base 71: mod_base = um
  modified_base 72: mod_base = um
  modified_base 73: mod_base = gm
  modified_base 74: mod_base = OTHER; note = 2'-O-methyladenosine
  modified_base 75: mod_base = OTHER; note = 2'-O-methyladenosine
  modified_base 76: mod_base = OTHER; note = 2'-O-methyladenosine
  modified_base 77: mod_base = OTHER; note = 2'-O-methyladenosine
  modified_base 78: mod_base = OTHER; note = 2'-O-methyladenosine
  modified_base 79: mod_base = gm
  modified_base 80: mod_base = um
  modified_base 81: mod_base = gm
  modified_base 82: mod_base = gm
  modified_base 83: mod_base = cm
  modified_base 84: mod_base = OTHER; note = 2'-O-methyladenosine
  modified_base 85: mod_base = cm
  modified_base 86: mod_base = cm
  modified_base 87: mod_base = gm
  modified_base 88: mod_base = OTHER; note = 2'-O-methyladenosine
  modified_base 89: mod_base = gm
  modified_base 90: mod_base = um
  modified_base 91: mod_base = cm
  modified_base 92: mod_base = gm
  modified_base 93: mod_base = gm
  modified_base 94: mod_base = um
  modified_base 95: mod_base = gm
  modified_base 96: mod_base = cm
  modified_base 111: mod_base = OTHER; note = 2' fluoro modified base
  modified_base 116: mod_base = OTHER; note = 2' fluoro modified base
  modified_base 119: mod_base = um
  modified_base 120: mod_base = OTHER; note = Phosphorothioate (PS) linkage
  modified_base 120: mod_base = um
  modified_base 121: mod_base = OTHER; note = Phosphorothioate (PS) linkage
  modified_base 121: mod_base = um
  modified_base 122: mod_base = OTHER; note = Phosphorothioate (PS) linkage
  modified_base 122: mod_base = um
  source 1..122: mol_type = other RNA

SEQ ID NO: 1158 - RNA, 123 nt, synthetic construct
  modified_base 1: mod_base = um
  modified_base 2: mod_base = OTHER; note = Phosphorothioate (PS) linkage
  modified_base 2: mod_base = um
  modified_base 3: mod_base = OTHER; note = Phosphorothioate (PS) linkage
  modified_base 3: mod_base = gm
  modified_base 4: mod_base = OTHER; note = Phosphorothioate (PS) linkage
  modified_base 29: mod_base = gm
  modified_base 30: mod_base = cm
  modified_base 31: mod_base = um
  modified_base 32: mod_base = OTHER; note = 2'-O-methyladenosine
  modified_base 33: mod_base = gm
  modified_base 34: mod_base = OTHER; note = 2'-O-methyladenosine
  modified_base 35: mod_base = OTHER; note = 2'-O-methyladenosine
  modified_base 36: mod_base = OTHER; note = 2'-O-methyladenosine
  modified_base 37: mod_base = um
  modified_base 38: mod_base = OTHER; note = 2'-O-methyladenosine
  modified_base 39: mod_base = gm
  modified_base 40: mod_base = cm
  modified_base 68: mod_base = OTHER; note = 2'-O-methyladenosine
  modified_base 69: mod_base = OTHER; note = 2'-O-methyladenosine
  modified_base 70: mod_base = cm
  modified_base 71: mod_base = um
  modified_base 72: mod_base = um
  modified_base 73: mod_base = gm
  modified_base 74: mod_base = OTHER; note = 2'-O-methyladenosine
  modified_base 75: mod_base = OTHER; note = 2'-O-methyladenosine
  modified_base 76: mod_base = OTHER; note = 2'-O-methyladenosine
  modified_base 77: mod_base = OTHER; note = 2'-O-methyladenosine
  modified_base 78: mod_base = OTHER; note = 2'-O-methyladenosine
  modified_base 79: mod_base = gm
  modified_base 80: mod_base = um
  modified_base 81: mod_base = gm
  modified_base 82: mod_base = gm
  modified_base 83: mod_base = cm
  modified_base 84: mod_base = OTHER; note = 2'-O-methyladenosine
  modified_base 85: mod_base = cm
  modified_base 86: mod_base = cm
  modified_base 87: mod_base = gm
  modified_base 88: mod_base = OTHER; note = 2'-O-methyladenosine
  modified_base 89: mod_base = gm
  modified_base 90: mod_base = um
  modified_base 91: mod_base = cm
  modified_base 92: mod_base = gm
  modified_base 93: mod_base = gm
  modified_base 94: mod_base = um
  modified_base 95: mod_base = gm
  modified_base 96: mod_base = cm
  modified_base 111: mod_base = OTHER; note = 2' fluoro modified base
  modified_base 116: mod_base = OTHER; note = 2' fluoro modified base
  modified_base 119: mod_base = um
  modified_base 120: mod_base = OTHER; note = Phosphorothioate (PS) linkage
  modified_base 120: mod_base = um
  modified_base 121: mod_base = OTHER; note = Phosphorothioate (PS) linkage
  modified_base 121: mod_base = um
  modified_base 122: mod_base = OTHER; note = Phosphorothioate (PS) linkage
  modified_base 122: mod_base = um
  modified_base 123: mod_base = OTHER; note = Phosphorothioate (PS) linkage
  modified_base 123: mod_base = um
  source 1..123: mol_type = other RNA
ttggtgactgccacgcccaagttttagagctagaaatagcaagttaaaataaggctagtccgttatcaacttgaaaaagtggcaccgagtcggtgcgtgaacaccccttgggcgtggcttttt

SEQ ID NO: 1159 - RNA, 124 nt, synthetic construct; identical to SEQ ID NO: 1126
  modified_base 1: mod_base = um
  modified_base 2: mod_base = OTHER; note = Phosphorothioate (PS) linkage
  modified_base 2: mod_base = um
  modified_base 3: mod_base = OTHER; note = Phosphorothioate (PS) linkage
  modified_base 3: mod_base = gm
  modified_base 4: mod_base = OTHER; note = Phosphorothioate (PS) linkage
  modified_base 29: mod_base = gm
  modified_base 30: mod_base = cm
  modified_base 31: mod_base = um
  modified_base 32: mod_base = OTHER; note = 2'-O-methyladenosine
  modified_base 33: mod_base = gm
  modified_base 34: mod_base = OTHER; note = 2'-O-methyladenosine
  modified_base 35: mod_base = OTHER; note = 2'-O-methyladenosine
  modified_base 36: mod_base = OTHER; note = 2'-O-methyladenosine
  modified_base 37: mod_base = um
  modified_base 38: mod_base = OTHER; note = 2'-O-methyladenosine
  modified_base 39: mod_base = gm
  modified_base 40: mod_base = cm
  modified_base 68: mod_base = OTHER; note = 2'-O-methyladenosine
  modified_base 69: mod_base = OTHER; note = 2'-O-methyladenosine
  modified_base 70: mod_base = cm
  modified_base 71: mod_base = um
  modified_base 72: mod_base = um
  modified_base 73: mod_base = gm
  modified_base 74: mod_base = OTHER; note = 2'-O-methyladenosine
  modified_base 75: mod_base = OTHER; note = 2'-O-methyladenosine
  modified_base 76: mod_base = OTHER; note = 2'-O-methyladenosine
  modified_base 77: mod_base = OTHER; note = 2'-O-methyladenosine
  modified_base 78: mod_base = OTHER; note = 2'-O-methyladenosine
  modified_base 79: mod_base = gm
  modified_base 80: mod_base = um
  modified_base 81: mod_base = gm
  modified_base 82: mod_base = gm
  modified_base 83: mod_base = cm
  modified_base 84: mod_base = OTHER; note = 2'-O-methyladenosine
  modified_base 85: mod_base = cm
  modified_base 86: mod_base = cm
  modified_base 87: mod_base = gm
  modified_base 88: mod_base = OTHER; note = 2'-O-methyladenosine
  modified_base 89: mod_base = gm
  modified_base 90: mod_base = um
  modified_base 91: mod_base = cm
  modified_base 92: mod_base = gm
  modified_base 93: mod_base = gm
  modified_base 94: mod_base = um
  modified_base 95: mod_base = gm
  modified_base 96: mod_base = cm
  modified_base 111: mod_base = OTHER; note = 2' fluoro modified base
  modified_base 116: mod_base = OTHER; note = 2' fluoro modified base
  modified_base 119: mod_base = um
  modified_base 120: mod_base = OTHER; note = Phosphorothioate (PS) linkage
  modified_base 120: mod_base = um
  modified_base 121: mod_base = OTHER; note = Phosphorothioate (PS) linkage
  modified_base 121: mod_base = um
  modified_base 122: mod_base = OTHER; note = Phosphorothioate (PS) linkage
  modified_base 122: mod_base = um
  modified_base 123: mod_base = OTHER; note = Phosphorothioate (PS) linkage
  modified_base 123: mod_base = um
  modified_base 124: mod_base = OTHER; note = Phosphorothioate (PS) linkage
  modified_base 124: mod_base = um
  source 1..124: mol_type = other RNA

SEQ ID NO: 1160 - RNA, 125 nt, synthetic construct
  modified_base 1: mod_base = um
  modified_base 2: mod_base = OTHER; note = Phosphorothioate (PS) linkage
  modified_base 2: mod_base = um
  modified_base 3: mod_base = OTHER; note = Phosphorothioate (PS) linkage
  modified_base 3: mod_base = gm
  modified_base 4: mod_base = OTHER; note = Phosphorothioate (PS) linkage
  modified_base 29: mod_base = gm
  modified_base 30: mod_base = cm
  modified_base 31: mod_base = um
  modified_base 32: mod_base = OTHER; note = 2'-O-methyladenosine
  modified_base 33: mod_base = gm
  modified_base 34: mod_base = OTHER; note = 2'-O-methyladenosine
  modified_base 35: mod_base = OTHER; note = 2'-O-methyladenosine
  modified_base 36: mod_base = OTHER; note = 2'-O-methyladenosine
  modified_base 37: mod_base = um
  modified_base 38: mod_base = OTHER; note = 2'-O-methyladenosine
  modified_base 39: mod_base = gm
  modified_base 40: mod_base = cm
  modified_base 68: mod_base = OTHER; note = 2'-O-methyladenosine
  modified_base 69: mod_base = OTHER; note = 2'-O-methyladenosine
  modified_base 70: mod_base = cm
  modified_base 71: mod_base = um
  modified_base 72: mod_base = um
  modified_base 73: mod_base = gm
  modified_base 74: mod_base = OTHER; note = 2'-O-methyladenosine
  modified_base 75: mod_base = OTHER; note = 2'-O-methyladenosine
  modified_base 76: mod_base = OTHER; note = 2'-O-methyladenosine
  modified_base 77: mod_base = OTHER; note = 2'-O-methyladenosine
  modified_base 78: mod_base = OTHER; note = 2'-O-methyladenosine
  modified_base 79: mod_base = gm
  modified_base 80: mod_base = um
  modified_base 81: mod_base = gm
  modified_base 82: mod_base = gm
  modified_base 83: mod_base = cm
  modified_base 84: mod_base = OTHER; note = 2'-O-methyladenosine
  modified_base 85: mod_base = cm
  modified_base 86: mod_base = cm
  modified_base 87: mod_base = gm
  modified_base 88: mod_base = OTHER; note = 2'-O-methyladenosine
  modified_base 89: mod_base = gm
  modified_base 90: mod_base = um
  modified_base 91: mod_base = cm
  modified_base 92: mod_base = gm
  modified_base 93: mod_base = gm
  modified_base 94: mod_base = um
  modified_base 95: mod_base = gm
  modified_base 96: mod_base = cm
  modified_base 111: mod_base = OTHER; note = 2' fluoro modified base
  modified_base 116: mod_base = OTHER; note = 2' fluoro modified base
  modified_base 119: mod_base = um
  modified_base 120: mod_base = OTHER; note = Phosphorothioate (PS) linkage
  modified_base 120: mod_base = um
  modified_base 121: mod_base = OTHER; note = Phosphorothioate (PS) linkage
  modified_base 121: mod_base = um
  modified_base 122: mod_base = OTHER; note = Phosphorothioate (PS) linkage
  modified_base 122: mod_base = um
  modified_base 123: mod_base = OTHER; note = Phosphorothioate (PS) linkage
  modified_base 123: mod_base = um
  modified_base 124: mod_base = OTHER; note = Phosphorothioate (PS) linkage
  modified_base 124: mod_base = um
  modified_base 125: mod_base = OTHER; note = Phosphorothioate (PS) linkage
  modified_base 125: mod_base = um
  source 1..125: mol_type = other RNA
ttggtgactgccacgcccaagttttagagctagaaatagcaagttaaaataaggctagtccgttatcaacttgaaaaagtggcaccgagtcggtgcgtgaacaccccttgggcgtggcttttttt

SEQ ID NO: 1161 - RNA, 122 nt, synthetic construct; identical to SEQ ID NO: 37
  modified_base 1: mod_base = um
  modified_base 2: mod_base = OTHER; note = Phosphorothioate (PS) linkage
  modified_base 2: mod_base = um
  modified_base 3: mod_base = OTHER; note = Phosphorothioate (PS) linkage
  modified_base 3: mod_base = gm
  modified_base 4: mod_base = OTHER; note = Phosphorothioate (PS) linkage
  modified_base 29: mod_base = gm
  modified_base 30: mod_base = cm
  modified_base 31: mod_base = um
  modified_base 32: mod_base = OTHER; note = 2'-O-methyladenosine
  modified_base 33: mod_base = gm
  modified_base 34: mod_base = OTHER; note = 2'-O-methyladenosine
  modified_base 35: mod_base = OTHER; note = 2'-O-methyladenosine
  modified_base 36: mod_base = OTHER; note = 2'-O-methyladenosine
  modified_base 37: mod_base = um
  modified_base 38: mod_base = OTHER; note = 2'-O-methyladenosine
  modified_base 39: mod_base = gm
  modified_base 40: mod_base = cm
  modified_base 68: mod_base = OTHER; note = 2'-O-methyladenosine
  modified_base 69: mod_base = OTHER; note = 2'-O-methyladenosine
  modified_base 70: mod_base = cm
  modified_base 71: mod_base = um
  modified_base 72: mod_base = um
  modified_base 73: mod_base = gm
  modified_base 74: mod_base = OTHER; note = 2'-O-methyladenosine
  modified_base 75: mod_base = OTHER; note = 2'-O-methyladenosine
  modified_base 76: mod_base = OTHER; note = 2'-O-methyladenosine
  modified_base 77: mod_base = OTHER; note = 2'-O-methyladenosine
  modified_base 78: mod_base = OTHER; note = 2'-O-methyladenosine
  modified_base 79: mod_base = gm
  modified_base 80: mod_base = um
  modified_base 81: mod_base = gm
  modified_base 82: mod_base = gm
  modified_base 83: mod_base = cm
  modified_base 84: mod_base = OTHER; note = 2'-O-methyladenosine
  modified_base 85: mod_base = cm
  modified_base 86: mod_base = cm
  modified_base 87: mod_base = gm
  modified_base 88: mod_base = OTHER; note = 2'-O-methyladenosine
  modified_base 89: mod_base = gm
  modified_base 90: mod_base = um
  modified_base 91: mod_base = cm
  modified_base 92: mod_base = gm
  modified_base 93: mod_base = gm
  modified_base 94: mod_base = um
  modified_base 95: mod_base = gm
  modified_base 96: mod_base = cm
  modified_base 119: mod_base = um
  modified_base 120: mod_base = OTHER; note = Phosphorothioate (PS) linkage
  modified_base 120: mod_base = um
  modified_base 121: mod_base = OTHER; note = Phosphorothioate (PS) linkage
  modified_base 121: mod_base = um
  modified_base 122: mod_base = OTHER; note = Phosphorothioate (PS) linkage
  modified_base 122: mod_base = um
  source 1..122: mol_type = other RNA

SEQ ID NO: 1162 - RNA, 122 nt, synthetic construct; identical to SEQ ID NO: 37
  modified_base 1: mod_base = um
  modified_base 2: mod_base = OTHER; note = Phosphorothioate (PS) linkage
  modified_base 2: mod_base = um
  modified_base 3: mod_base = OTHER; note = Phosphorothioate (PS) linkage
  modified_base 3: mod_base = gm
  modified_base 4: mod_base = OTHER; note = Phosphorothioate (PS) linkage
  modified_base 29: mod_base = gm
  modified_base 30: mod_base = cm
  modified_base 31: mod_base = um
  modified_base 32: mod_base = OTHER; note = 2'-O-methyladenosine
  modified_base 33: mod_base = gm
  modified_base 34: mod_base = OTHER; note = 2'-O-methyladenosine
  modified_base 35: mod_base = OTHER; note = 2'-O-methyladenosine
  modified_base 36: mod_base = OTHER; note = 2'-O-methyladenosine
  modified_base 37: mod_base = um
  modified_base 38: mod_base = OTHER; note = 2'-O-methyladenosine
  modified_base 39: mod_base = gm
  modified_base 40: mod_base = cm
  modified_base 68: mod_base = OTHER; note = 2'-O-methyladenosine
  modified_base 69: mod_base = OTHER; note = 2'-O-methyladenosine
  modified_base 70: mod_base = cm
  modified_base 71: mod_base = um
  modified_base 72: mod_base = um
  modified_base 73: mod_base = gm
  modified_base 74: mod_base = OTHER; note = 2'-O-methyladenosine
  modified_base 75: mod_base = OTHER; note = 2'-O-methyladenosine
  modified_base 76: mod_base = OTHER; note = 2'-O-methyladenosine
  modified_base 77: mod_base = OTHER; note = 2'-O-methyladenosine
  modified_base 78: mod_base = OTHER; note = 2'-O-methyladenosine
  modified_base 79: mod_base = gm
  modified_base 80: mod_base = um
  modified_base 81: mod_base = gm
  modified_base 82: mod_base = gm
  modified_base 83: mod_base = cm
  modified_base 84: mod_base = OTHER; note = 2'-O-methyladenosine
  modified_base 85: mod_base = cm
  modified_base 86: mod_base = cm
  modified_base 87: mod_base = gm
  modified_base 88: mod_base = OTHER; note = 2'-O-methyladenosine
  modified_base 89: mod_base = gm
  modified_base 90: mod_base = um
  modified_base 91: mod_base = cm
  modified_base 92: mod_base = gm
  modified_base 93: mod_base = gm
  modified_base 94: mod_base = um
  modified_base 95: mod_base = gm
  modified_base 96: mod_base = cm
  modified_base 119: mod_base = um
  modified_base 120: mod_base = OTHER; note = Phosphorothioate (PS) linkage
  modified_base 120: mod_base = um
  modified_base 121: mod_base = OTHER; note = Phosphorothioate (PS) linkage
  modified_base 121: mod_base = um
  modified_base 122: mod_base = OTHER; note = Phosphorothioate (PS) linkage
  modified_base 122: mod_base = um
  source 1..122: mol_type = other RNA

SEQ ID NO: 1163 - RNA, 122 nt, synthetic construct; identical to SEQ ID NO: 37
  modified_base 1: mod_base = um
  modified_base 2: mod_base = OTHER; note = Phosphorothioate (PS) linkage
  modified_base 2: mod_base = um
  modified_base 3: mod_base = OTHER; note = Phosphorothioate (PS) linkage
  modified_base 3: mod_base = gm
  modified_base 4: mod_base = OTHER; note = Phosphorothioate (PS) linkage
  modified_base 29: mod_base = gm
  modified_base 30: mod_base = cm
  modified_base 31: mod_base = um
  modified_base 32: mod_base = OTHER; note = 2'-O-methyladenosine
  modified_base 33: mod_base = gm
  modified_base 34: mod_base = OTHER; note = 2'-O-methyladenosine
  modified_base 35: mod_base = OTHER; note = 2'-O-methyladenosine
  modified_base 36: mod_base = OTHER; note = 2'-O-methyladenosine
  modified_base 37: mod_base = um
  modified_base 38: mod_base = OTHER; note = 2'-O-methyladenosine
  modified_base 39: mod_base = gm
  modified_base 40: mod_base = cm
  modified_base 68: mod_base = OTHER; note = 2'-O-methyladenosine
  modified_base 69: mod_base = OTHER; note = 2'-O-methyladenosine
  modified_base 70: mod_base = cm
  modified_base 71: mod_base = um
  modified_base 72: mod_base = um
  modified_base 73: mod_base = gm
  modified_base 74: mod_base = OTHER; note = 2'-O-methyladenosine
  modified_base 75: mod_base = OTHER; note = 2'-O-methyladenosine
  modified_base 76: mod_base = OTHER; note = 2'-O-methyladenosine
  modified_base 77: mod_base = OTHER; note = 2'-O-methyladenosine
  modified_base 78: mod_base = OTHER; note = 2'-O-methyladenosine
  modified_base 79: mod_base = gm
  modified_base 80: mod_base = um
  modified_base 81: mod_base = gm
  modified_base 82: mod_base = gm
  modified_base 83: mod_base = cm
  modified_base 84: mod_base = OTHER; note = 2'-O-methyladenosine
  modified_base 85: mod_base = cm
  modified_base 86: mod_base = cm
  modified_base 87: mod_base = gm
  modified_base 88: mod_base = OTHER; note = 2'-O-methyladenosine
  modified_base 89: mod_base = gm
  modified_base 90: mod_base = um
  modified_base 91: mod_base = cm
  modified_base 92: mod_base = gm
  modified_base 93: mod_base = gm
  modified_base 94: mod_base = um
  modified_base 95: mod_base = gm
  modified_base 96: mod_base = cm
  modified_base 119: mod_base = um
  modified_base 120: mod_base = OTHER; note = Phosphorothioate (PS) linkage
  modified_base 120: mod_base = um
  modified_base 121: mod_base = OTHER; note = Phosphorothioate (PS) linkage
  modified_base 121: mod_base = um
  modified_base 122: mod_base = OTHER; note = Phosphorothioate (PS) linkage
  modified_base 122: mod_base = um
  source 1..122: mol_type = other RNA

SEQ ID NO: 1164 - RNA, 122 nt, synthetic construct; identical to SEQ ID NO: 37
  modified_base 1: mod_base = um
  modified_base 2: mod_base = OTHER; note = Phosphorothioate (PS) linkage
  modified_base 2: mod_base = um
  modified_base 3: mod_base = OTHER; note = Phosphorothioate (PS) linkage
  modified_base 3: mod_base = gm
  modified_base 4: mod_base = OTHER; note = Phosphorothioate (PS) linkage
  modified_base 29: mod_base = gm
  modified_base 30: mod_base = cm
  modified_base 31: mod_base = um
  modified_base 32: mod_base = OTHER; note = 2'-O-methyladenosine
  modified_base 33: mod_base = gm
  modified_base 34: mod_base = OTHER; note = 2'-O-methyladenosine
  modified_base 35: mod_base = OTHER; note = 2'-O-methyladenosine
  modified_base 36: mod_base = OTHER; note = 2'-O-methyladenosine
  modified_base 37: mod_base = um
  modified_base 38: mod_base = OTHER; note = 2'-O-methyladenosine
  modified_base 39: mod_base = gm
  modified_base 40: mod_base = cm
  modified_base 68: mod_base = OTHER; note = 2'-O-methyladenosine
  modified_base 69: mod_base = OTHER; note = 2'-O-methyladenosine
  modified_base 70: mod_base = cm
  modified_base 71: mod_base = um
  modified_base 72: mod_base = um
  modified_base 73: mod_base = gm
  modified_base 74: mod_base = OTHER; note = 2'-O-methyladenosine
  modified_base 75: mod_base = OTHER; note = 2'-O-methyladenosine
  modified_base 76: mod_base = OTHER; note = 2'-O-methyladenosine
  modified_base 77: mod_base = OTHER; note = 2'-O-methyladenosine
  modified_base 78: mod_base = OTHER; note = 2'-O-methyladenosine
  modified_base 79: mod_base = gm
  modified_base 80: mod_base = um
  modified_base 81: mod_base = gm
  modified_base 82: mod_base = gm
  modified_base 83: mod_base = cm
  modified_base 84: mod_base = OTHER; note = 2'-O-methyladenosine
  modified_base 85: mod_base = cm
  modified_base 86: mod_base = cm
  modified_base 87: mod_base = gm
  modified_base 88: mod_base = OTHER; note = 2'-O-methyladenosine
  modified_base 89: mod_base = gm
  modified_base 90: mod_base = um
  modified_base 91: mod_base = cm
  modified_base 92: mod_base = gm
  modified_base 93: mod_base = gm
  modified_base 94: mod_base = um
  modified_base 95: mod_base = gm
  modified_base 96: mod_base = cm
  modified_base 119: mod_base = um
  modified_base 120: mod_base = OTHER; note = Phosphorothioate (PS) linkage
  modified_base 120: mod_base = um
  modified_base 121: mod_base = OTHER; note = Phosphorothioate (PS) linkage
  modified_base 121: mod_base = um
  modified_base 122: mod_base = OTHER; note = Phosphorothioate (PS) linkage
  modified_base 122: mod_base = um
  source 1..122: mol_type = other RNA

SEQ ID NO: 1165 - RNA, 122 nt, synthetic construct; identical to SEQ ID NO: 37
  modified_base 1: mod_base = um
  modified_base 2: mod_base = OTHER; note = Phosphorothioate (PS) linkage
  modified_base 2: mod_base = um
  modified_base 3: mod_base = OTHER; note = Phosphorothioate (PS) linkage
  modified_base 3: mod_base = gm
  modified_base 4: mod_base = OTHER; note = Phosphorothioate (PS) linkage
  modified_base 29: mod_base = gm
  modified_base 30: mod_base = cm
  modified_base 31: mod_base = um
  modified_base 32: mod_base = OTHER; note = 2'-O-methyladenosine
  modified_base 33: mod_base = gm
  modified_base 34: mod_base = OTHER; note = 2'-O-methyladenosine
  modified_base 35: mod_base = OTHER; note = 2'-O-methyladenosine
  modified_base 36: mod_base = OTHER; note = 2'-O-methyladenosine
  modified_base 37: mod_base = um
  modified_base 38: mod_base = OTHER; note = 2'-O-methyladenosine
  modified_base 39: mod_base = gm
  modified_base 40: mod_base = cm
  modified_base 68: mod_base = OTHER; note = 2'-O-methyladenosine
  modified_base 69: mod_base = OTHER; note = 2'-O-methyladenosine
  modified_base 70: mod_base = cm
  modified_base 71: mod_base = um
  modified_base 72: mod_base = um
  modified_base 73: mod_base = gm
  modified_base 74: mod_base = OTHER; note = 2'-O-methyladenosine
  modified_base 75: mod_base = OTHER; note = 2'-O-methyladenosine
  modified_base 76: mod_base = OTHER; note = 2'-O-methyladenosine
  modified_base 77: mod_base = OTHER; note = 2'-O-methyladenosine
  modified_base 78: mod_base = OTHER; note = 2'-O-methyladenosine
  modified_base 79: mod_base = gm
  modified_base 80: mod_base = um
  modified_base 81: mod_base = gm
  modified_base 82: mod_base = gm
  modified_base 83: mod_base = cm
  modified_base 84: mod_base = OTHER; note = 2'-O-methyladenosine
  modified_base 85: mod_base = cm
  modified_base 86: mod_base = cm
  modified_base 87: mod_base = gm
  modified_base 88: mod_base = OTHER; note = 2'-O-methyladenosine
  modified_base 89: mod_base = gm
  modified_base 90: mod_base = um
  modified_base 91: mod_base = cm
  modified_base 92: mod_base = gm
  modified_base 93: mod_base = gm
  modified_base 94: mod_base = um
  modified_base 95: mod_base = gm
  modified_base 96: mod_base = cm
  modified_base 119: mod_base = um
  modified_base 120: mod_base = OTHER; note = Phosphorothioate (PS) linkage
  modified_base 120: mod_base = um
  modified_base 121: mod_base = OTHER; note = Phosphorothioate (PS) linkage
  modified_base 121: mod_base = um
  modified_base 122: mod_base = OTHER; note = Phosphorothioate (PS) linkage
  modified_base 122: mod_base = um
  source 1..122: mol_type = other RNA

SEQ ID NO: 1166 - RNA, 122 nt, synthetic construct; identical to SEQ ID NO: 37
  modified_base 1: mod_base = um
  modified_base 2: mod_base = OTHER; note = Phosphorothioate (PS) linkage
  modified_base 2: mod_base = um
  modified_base 3: mod_base = OTHER; note = Phosphorothioate (PS) linkage
  modified_base 3: mod_base = gm
  modified_base 4: mod_base = OTHER; note = Phosphorothioate (PS) linkage
  modified_base 29: mod_base = gm
  modified_base 30: mod_base = cm
  modified_base 31: mod_base = um
  modified_base 32: mod_base = OTHER; note = 2'-O-methyladenosine
  modified_base 33: mod_base = gm
  modified_base 34: mod_base = OTHER; note = 2'-O-methyladenosine
  modified_base 35: mod_base = OTHER; note = 2'-O-methyladenosine
  modified_base 36: mod_base = OTHER; note = 2'-O-methyladenosine
  modified_base 37: mod_base = um
  modified_base 38: mod_base = OTHER; note = 2'-O-methyladenosine
  modified_base 39: mod_base = gm
  modified_base 40: mod_base = cm
  modified_base 68: mod_base = OTHER; note = 2'-O-methyladenosine
  modified_base 69: mod_base = OTHER; note = 2'-O-methyladenosine
  modified_base 70: mod_base = cm
  modified_base 71: mod_base = um
  modified_base 72: mod_base = um
  modified_base 73: mod_base = gm
  modified_base 74: mod_base = OTHER; note = 2'-O-methyladenosine
  modified_base 75: mod_base = OTHER; note = 2'-O-methyladenosine
  modified_base 76: mod_base = OTHER; note = 2'-O-methyladenosine
  modified_base 77: mod_base = OTHER; note = 2'-O-methyladenosine
  modified_base 78: mod_base = OTHER; note = 2'-O-methyladenosine
  modified_base 79: mod_base = gm
  modified_base 80: mod_base = um
  modified_base 81: mod_base = gm
  modified_base 82: mod_base = gm
  modified_base 83: mod_base = cm
  modified_base 84: mod_base = OTHER; note = 2'-O-methyladenosine
  modified_base 85: mod_base = cm
  modified_base 86: mod_base = cm
  modified_base 87: mod_base = gm
  modified_base 88: mod_base = OTHER; note = 2'-O-methyladenosine
  modified_base 89: mod_base = gm
  modified_base 90: mod_base = um
  modified_base 91: mod_base = cm
  modified_base 92: mod_base = gm
  modified_base 93: mod_base = gm
  modified_base 94: mod_base = um
  modified_base 95: mod_base = gm
  modified_base 96: mod_base = cm
  modified_base 119: mod_base = um
  modified_base 120: mod_base = OTHER; note = Phosphorothioate (PS) linkage
  modified_base 120: mod_base = um
  modified_base 121: mod_base = OTHER; note = Phosphorothioate (PS) linkage
  modified_base 121: mod_base = um
  modified_base 122: mod_base = OTHER; note = Phosphorothioate (PS) linkage
  modified_base 122: mod_base = um
  source 1..122: mol_type = other RNA

SEQ ID NO: 1167 - RNA, 122 nt, synthetic construct; identical to SEQ ID NO: 37
  modified_base 1: mod_base = um
  modified_base 2: mod_base = OTHER; note = Phosphorothioate (PS) linkage
  modified_base 2: mod_base = um
  modified_base 3: mod_base = OTHER; note = Phosphorothioate (PS) linkage
  modified_base 3: mod_base = gm
  modified_base 4: mod_base = OTHER; note = Phosphorothioate (PS) linkage
  modified_base 29: mod_base = gm
  modified_base 30: mod_base = cm
  modified_base 31: mod_base = um
  modified_base 32: mod_base = OTHER; note = 2'-O-methyladenosine
  modified_base 33: mod_base = gm
  modified_base 34: mod_base = OTHER; note = 2'-O-methyladenosine
  modified_base 35: mod_base = OTHER; note = 2'-O-methyladenosine
  modified_base 36: mod_base = OTHER; note = 2'-O-methyladenosine
  modified_base 37: mod_base = um
  modified_base 38: mod_base = OTHER; note = 2'-O-methyladenosine
  modified_base 39: mod_base = gm
  modified_base 40: mod_base = cm
  modified_base 68: mod_base = OTHER; note = 2'-O-methyladenosine
  modified_base 69: mod_base = OTHER; note = 2'-O-methyladenosine
  modified_base 70: mod_base = cm
  modified_base 71: mod_base = um
  modified_base 72: mod_base = um
  modified_base 73: mod_base = gm
  modified_base 74: mod_base = OTHER; note = 2'-O-methyladenosine
  modified_base 75: mod_base = OTHER; note = 2'-O-methyladenosine
  modified_base 76: mod_base = OTHER; note = 2'-O-methyladenosine
  modified_base 77: mod_base = OTHER; note = 2'-O-methyladenosine
  modified_base 78: mod_base = OTHER; note = 2'-O-methyladenosine
  modified_base 79: mod_base = gm
  modified_base 80: mod_base = um
  modified_base 81: mod_base = gm
  modified_base 82: mod_base = gm
  modified_base 83: mod_base = cm
  modified_base 84: mod_base = OTHER; note = 2'-O-methyladenosine
  modified_base 85: mod_base = cm
  modified_base 86: mod_base = cm
  modified_base 87: mod_base = gm
  modified_base 88: mod_base = OTHER; note = 2'-O-methyladenosine
  modified_base 89: mod_base = gm
  modified_base 90: mod_base = um
  modified_base 91: mod_base = cm
  modified_base 92: mod_base = gm
  modified_base 93: mod_base = gm
  modified_base 94: mod_base = um
  modified_base 95: mod_base = gm
  modified_base 96: mod_base = cm
  modified_base 119: mod_base = um
  modified_base 120: mod_base = OTHER; note = Phosphorothioate (PS) linkage
  modified_base 120: mod_base = um
  modified_base 121: mod_base = OTHER; note = Phosphorothioate (PS) linkage
  modified_base 121: mod_base = um
  modified_base 122: mod_base = OTHER; note = Phosphorothioate (PS) linkage
  modified_base 122: mod_base = um
  source 1..122: mol_type = other RNA

SEQ ID NO: 1168 - RNA, 122 nt, synthetic construct; identical to SEQ ID NO: 37
  modified_base 1: mod_base = um
  modified_base 2: mod_base = OTHER; note = Phosphorothioate (PS) linkage
  modified_base 2: mod_base = um
  modified_base 3: mod_base = OTHER; note = Phosphorothioate (PS) linkage
  modified_base 3: mod_base = gm
  modified_base 4: mod_base = OTHER; note = Phosphorothioate (PS) linkage
  modified_base 29: mod_base = gm
  modified_base 30: mod_base = cm
  modified_base 31: mod_base = um
  modified_base 32: mod_base = OTHER; note = 2'-O-methyladenosine
  modified_base 33: mod_base = gm
  modified_base 34: mod_base = OTHER; note = 2'-O-methyladenosine
  modified_base 35: mod_base = OTHER; note = 2'-O-methyladenosine
  modified_base 36: mod_base = OTHER; note = 2'-O-methyladenosine
  modified_base 37: mod_base = um
  modified_base 38: mod_base = OTHER; note = 2'-O-methyladenosine
  modified_base 39: mod_base = gm
  modified_base 40: mod_base = cm
  modified_base 68: mod_base = OTHER; note = 2'-O-methyladenosine
  modified_base 69: mod_base = OTHER; note = 2'-O-methyladenosine
  modified_base 70: mod_base = cm
  modified_base 71: mod_base = um
  modified_base 72: mod_base = um
  modified_base 73: mod_base = gm
  modified_base 74: mod_base = OTHER; note = 2'-O-methyladenosine
  modified_base 75: mod_base = OTHER; note = 2'-O-methyladenosine
  modified_base 76: mod_base = OTHER; note = 2'-O-methyladenosine
  modified_base 77: mod_base = OTHER; note = 2'-O-methyladenosine
  modified_base 78: mod_base = OTHER; note = 2'-O-methyladenosine
  modified_base 79: mod_base = gm
  modified_base 80: mod_base = um
  modified_base 81: mod_base = gm
  modified_base 82: mod_base = gm
  modified_base 83: mod_base = cm
  modified_base 84: mod_base = OTHER; note = 2'-O-methyladenosine
  modified_base 85: mod_base = cm
  modified_base 86: mod_base = cm
  modified_base 87: mod_base = gm
  modified_base 88: mod_base = OTHER; note = 2'-O-methyladenosine
  modified_base 89: mod_base = gm
  modified_base 90: mod_base = um
  modified_base 91: mod_base = cm
  modified_base 92: mod_base = gm
  modified_base 93: mod_base = gm
  modified_base 94: mod_base = um
  modified_base 95: mod_base = gm
  modified_base 96: mod_base = cm
  modified_base 119: mod_base = um
  modified_base 120: mod_base = OTHER; note = Phosphorothioate (PS) linkage
  modified_base 120: mod_base = um
  modified_base 121: mod_base = OTHER; note = Phosphorothioate (PS) linkage
  modified_base 121: mod_base = um
  modified_base 122: mod_base = OTHER; note = Phosphorothioate (PS) linkage
  modified_base 122: mod_base = um
  source 1..122: mol_type = other RNA

SEQ ID NO: 1169 - RNA, 122 nt, synthetic construct; identical to SEQ ID NO: 37
  modified_base 1: mod_base = um
  modified_base 2: mod_base = OTHER; note = Phosphorothioate (PS) linkage
  modified_base 2: mod_base = um
  modified_base 3: mod_base = OTHER; note = Phosphorothioate (PS) linkage
  modified_base 3: mod_base = gm
  modified_base 4: mod_base = OTHER; note = Phosphorothioate (PS) linkage
  modified_base 29: mod_base = gm
  modified_base 30: mod_base = cm
  modified_base 31: mod_base = um
  modified_base 32: mod_base = OTHER; note = 2'-O-methyladenosine
  modified_base 33: mod_base = gm
  modified_base 34: mod_base = OTHER; note = 2'-O-methyladenosine
  modified_base 35: mod_base = OTHER; note = 2'-O-methyladenosine
  modified_base 36: mod_base = OTHER; note = 2'-O-methyladenosine
  modified_base 37: mod_base = um
  modified_base 38: mod_base = OTHER; note = 2'-O-methyladenosine
  modified_base 39: mod_base = gm
  modified_base 40: mod_base = cm
  modified_base 68: mod_base = OTHER; note = 2'-O-methyladenosine
  modified_base 69: mod_base = OTHER; note = 2'-O-methyladenosine
  modified_base 70: mod_base = cm
  modified_base 71: mod_base = um
  modified_base 72: mod_base = um
  modified_base 73: mod_base = gm
  modified_base 74: mod_base = OTHER; note = 2'-O-methyladenosine
  modified_base 75: mod_base = OTHER; note = 2'-O-methyladenosine
  modified_base 76: mod_base = OTHER; note = 2'-O-methyladenosine
  modified_base 77: mod_base = OTHER; note = 2'-O-methyladenosine
  modified_base 78: mod_base = OTHER; note = 2'-O-methyladenosine
  modified_base 79: mod_base = gm
  modified_base 80: mod_base = um
  modified_base 81: mod_base = gm
  modified_base 82: mod_base = gm
  modified_base 83: mod_base = cm
  modified_base 84: mod_base = OTHER; note = 2'-O-methyladenosine
  modified_base 85: mod_base = cm
  modified_base 86: mod_base = cm
  modified_base 87: mod_base = gm
  modified_base 88: mod_base = OTHER; note = 2'-O-methyladenosine
  modified_base 89: mod_base = gm
  modified_base 90: mod_base = um
  modified_base 91: mod_base = cm
  modified_base 92: mod_base = gm
  modified_base 93: mod_base = gm
  modified_base 94: mod_base = um
  modified_base 95: mod_base = gm
  modified_base 96: mod_base = cm
  modified_base 119: mod_base = um
  modified_base 120: mod_base = OTHER; note = Phosphorothioate (PS) linkage
  modified_base 120: mod_base = um
  modified_base 121: mod_base = OTHER; note = Phosphorothioate (PS) linkage
  modified_base 121: mod_base = um
  modified_base 122: mod_base = OTHER; note = Phosphorothioate (PS) linkage
  modified_base 122: mod_base = um
  source 1..122: mol_type = other RNA

SEQ ID NO: 1170 - RNA, 122 nt, synthetic construct; identical to SEQ ID NO: 37
  modified_base 1: mod_base = um
  modified_base 2: mod_base = OTHER; note = Phosphorothioate (PS) linkage
  modified_base 2: mod_base = um
  modified_base 3: mod_base = OTHER; note = Phosphorothioate (PS) linkage
  modified_base 3: mod_base = gm
  modified_base 4: mod_base = OTHER; note = Phosphorothioate (PS) linkage
  modified_base 29: mod_base = gm
  modified_base 30: mod_base = cm
  modified_base 31: mod_base = um
  modified_base 32: mod_base = OTHER; note = 2'-O-methyladenosine
  modified_base 33: mod_base = gm
  modified_base 34: mod_base = OTHER; note = 2'-O-methyladenosine
  modified_base 35: mod_base = OTHER; note = 2'-O-methyladenosine
  modified_base 36: mod_base = OTHER; note = 2'-O-methyladenosine
  modified_base 37: mod_base = um
  modified_base 38: mod_base = OTHER; note = 2'-O-methyladenosine
  modified_base 39: mod_base = gm
  modified_base 40: mod_base = cm
  modified_base 68: mod_base = OTHER; note = 2'-O-methyladenosine
  modified_base 69: mod_base = OTHER; note = 2'-O-methyladenosine
  modified_base 70: mod_base = cm
  modified_base 71: mod_base = um
  modified_base 72: mod_base = um
  modified_base 73: mod_base = gm
  modified_base 74: mod_base = OTHER; note = 2'-O-methyladenosine
  modified_base 75: mod_base = OTHER; note = 2'-O-methyladenosine
  modified_base 76: mod_base = OTHER; note = 2'-O-methyladenosine
  modified_base 77: mod_base = OTHER; note = 2'-O-methyladenosine
  modified_base 78: mod_base = OTHER; note = 2'-O-methyladenosine
  modified_base 79: mod_base = gm
  modified_base 80: mod_base = um
  modified_base 81: mod_base = gm
  modified_base 82: mod_base = gm
  modified_base 83: mod_base = cm
  modified_base 84: mod_base = OTHER; note = 2'-O-methyladenosine
  modified_base 85: mod_base = cm
  modified_base 86: mod_base = cm
  modified_base 87: mod_base = gm
  modified_base 88: mod_base = OTHER; note = 2'-O-methyladenosine
  modified_base 89: mod_base = gm
  modified_base 90: mod_base = um
  modified_base 91: mod_base = cm
  modified_base 92: mod_base = gm
  modified_base 93: mod_base = gm
  modified_base 94: mod_base = um
  modified_base 95: mod_base = gm
  modified_base 96: mod_base = cm
  modified_base 119: mod_base = um
  modified_base 120: mod_base = OTHER; note = Phosphorothioate (PS) linkage
  modified_base 120: mod_base = um
  modified_base 121: mod_base = OTHER; note = Phosphorothioate (PS) linkage
  modified_base 121: mod_base = um
  modified_base 122: mod_base = OTHER; note = Phosphorothioate (PS) linkage
  modified_base 122: mod_base = um
  source 1..122: mol_type = other RNA

SEQ ID NO: 1171 - RNA, 122 nt, synthetic construct; identical to SEQ ID NO: 37
  modified_base 1: mod_base = um
  modified_base 2: mod_base = OTHER; note = Phosphorothioate (PS) linkage
  modified_base 2: mod_base = um
  modified_base 3: mod_base = OTHER; note = Phosphorothioate (PS) linkage
  modified_base 3: mod_base = gm
  modified_base 4: mod_base = OTHER; note = Phosphorothioate (PS) linkage
  modified_base 29: mod_base = gm
  modified_base 30: mod_base = cm
  modified_base 31: mod_base = um
  modified_base 32: mod_base = OTHER; note = 2'-O-methyladenosine
  modified_base 33: mod_base = gm
  modified_base 34: mod_base = OTHER; note = 2'-O-methyladenosine
  modified_base 35: mod_base = OTHER; note = 2'-O-methyladenosine
  modified_base 36: mod_base = OTHER; note = 2'-O-methyladenosine
  modified_base 37: mod_base = um
  modified_base 38: mod_base = OTHER; note = 2'-O-methyladenosine
  modified_base 39: mod_base = gm
  modified_base 40: mod_base = cm
  modified_base 68: mod_base = OTHER; note = 2'-O-methyladenosine
  modified_base 69: mod_base = OTHER; note = 2'-O-methyladenosine
  modified_base 70: mod_base = cm
  modified_base 71: mod_base = um
  modified_base 72: mod_base = um
  modified_base 73: mod_base = gm
  modified_base 74: mod_base = OTHER; note = 2'-O-methyladenosine
  modified_base 75: mod_base = OTHER; note = 2'-O-methyladenosine
  modified_base 76: mod_base = OTHER; note = 2'-O-methyladenosine
  modified_base 77: mod_base = OTHER; note = 2'-O-methyladenosine
  modified_base 78: mod_base = OTHER; note = 2'-O-methyladenosine
  modified_base 79: mod_base = gm
  modified_base 80: mod_base = um
  modified_base 81: mod_base = gm
  modified_base 82: mod_base = gm
  modified_base 83: mod_base = cm
  modified_base 84: mod_base = OTHER; note = 2'-O-methyladenosine
  modified_base 85: mod_base = cm
  modified_base 86: mod_base = cm
  modified_base 87: mod_base = gm
  modified_base 88: mod_base = OTHER; note = 2'-O-methyladenosine
  modified_base 89: mod_base = gm
  modified_base 90: mod_base = um
  modified_base 91: mod_base = cm
  modified_base 92: mod_base = gm
  modified_base 93: mod_base = gm
  modified_base 94: mod_base = um
  modified_base 95: mod_base = gm
  modified_base 96: mod_base = cm
  modified_base 119: mod_base = um
  modified_base 120: mod_base = OTHER; note = Phosphorothioate (PS) linkage
  modified_base 120: mod_base = um
  modified_base 121: mod_base = OTHER; note = Phosphorothioate (PS) linkage
  modified_base 121: mod_base = um
  modified_base 122: mod_base = OTHER; note = Phosphorothioate (PS) linkage
  modified_base 122: mod_base = um
  source 1..122: mol_type = other RNA

SEQ ID NO: 1172 - RNA, 122 nt, synthetic construct; identical to SEQ ID NO: 37
  modified_base 1: mod_base = um
  modified_base 2: mod_base = OTHER; note = Phosphorothioate (PS) linkage
  modified_base 2: mod_base = um
  modified_base 3: mod_base = OTHER; note = Phosphorothioate (PS) linkage
  modified_base 3: mod_base = gm
  modified_base 4: mod_base = OTHER; note = Phosphorothioate (PS) linkage
  modified_base 29: mod_base = gm
  modified_base 30: mod_base = cm
  modified_base 31: mod_base = um
  modified_base 32: mod_base = OTHER; note = 2'-O-methyladenosine
  modified_base 33: mod_base = gm
  modified_base 34: mod_base = OTHER; note = 2'-O-methyladenosine
  modified_base 35: mod_base = OTHER; note = 2'-O-methyladenosine
  modified_base 36: mod_base = OTHER; note = 2'-O-methyladenosine
  modified_base 37: mod_base = um
  modified_base 38: mod_base = OTHER; note = 2'-O-methyladenosine
  modified_base 39: mod_base = gm
  modified_base 40: mod_base = cm
  modified_base 68: mod_base = OTHER; note = 2'-O-methyladenosine
  modified_base 69: mod_base = OTHER; note = 2'-O-methyladenosine
  modified_base 70: mod_base = cm
  modified_base 71: mod_base = um
  modified_base 72: mod_base = um
  modified_base 73: mod_base = gm
  modified_base 74: mod_base = OTHER; note = 2'-O-methyladenosine
  modified_base 75: mod_base = OTHER; note = 2'-O-methyladenosine
  modified_base 76: mod_base = OTHER; note = 2'-O-methyladenosine
  modified_base 77: mod_base = OTHER; note = 2'-O-methyladenosine
  modified_base 78: mod_base = OTHER; note = 2'-O-methyladenosine
  modified_base 79: mod_base = gm
  modified_base 80: mod_base = um
  modified_base 81: mod_base = gm
  modified_base 82: mod_base = gm
  modified_base 83: mod_base = cm
  modified_base 84: mod_base = OTHER; note = 2'-O-methyladenosine
  modified_base 85: mod_base = cm
  modified_base 86: mod_base = cm
  modified_base 87: mod_base = gm
  modified_base 88: mod_base = OTHER; note = 2'-O-methyladenosine
  modified_base 89: mod_base = gm
  modified_base 90: mod_base = um
  modified_base 91: mod_base = cm
  modified_base 92: mod_base = gm
  modified_base 93: mod_base = gm
  modified_base 94: mod_base = um
  modified_base 95: mod_base = gm
  modified_base 96: mod_base = cm
  modified_base 119: mod_base = um
  modified_base 120: mod_base = OTHER; note = Phosphorothioate (PS) linkage
  modified_base 120: mod_base = um
  modified_base 121: mod_base = OTHER; note = Phosphorothioate (PS) linkage
  modified_base 121: mod_base = um
  modified_base 122: mod_base = OTHER; note = Phosphorothioate (PS) linkage
  modified_base 122: mod_base = um
  source 1..122: mol_type = other RNA

SEQ ID NO: 1173 - RNA, 122 nt, synthetic construct; identical to SEQ ID NO: 37
  modified_base 1: mod_base = um
  modified_base 2: mod_base = OTHER; note = Phosphorothioate (PS) linkage
  modified_base 2: mod_base = um
  modified_base 3: mod_base = OTHER; note = Phosphorothioate (PS) linkage
  modified_base 3: mod_base = gm
  modified_base 4: mod_base = OTHER; note = Phosphorothioate (PS) linkage
  modified_base 29: mod_base = gm
  modified_base 30: mod_base = cm
  modified_base 31: mod_base = um
  modified_base 32: mod_base = OTHER; note = 2'-O-methyladenosine
  modified_base 33: mod_base = gm
  modified_base 34: mod_base = OTHER; note = 2'-O-methyladenosine
  modified_base 35: mod_base = OTHER; note = 2'-O-methyladenosine
  modified_base 36: mod_base = OTHER; note = 2'-O-methyladenosine
  modified_base 37: mod_base = um
  modified_base 38: mod_base = OTHER; note = 2'-O-methyladenosine
  modified_base 39: mod_base = gm
  modified_base 40: mod_base = cm
  modified_base 68: mod_base = OTHER; note = 2'-O-methyladenosine
  modified_base 69: mod_base = OTHER; note = 2'-O-methyladenosine
  modified_base 70: mod_base = cm
  modified_base 71: mod_base = um
  modified_base 72: mod_base = um
  modified_base 73: mod_base = gm
  modified_base 74: mod_base = OTHER; note = 2'-O-methyladenosine
  modified_base 75: mod_base = OTHER; note = 2'-O-methyladenosine
  modified_base 76: mod_base = OTHER; note = 2'-O-methyladenosine
  modified_base 77: mod_base = OTHER; note = 2'-O-methyladenosine
  modified_base 78: mod_base = OTHER; note = 2'-O-methyladenosine
  modified_base 79: mod_base = gm
  modified_base 80: mod_base = um
  modified_base 81: mod_base = gm
  modified_base 82: mod_base = gm
  modified_base 83: mod_base = cm
  modified_base 84: mod_base = OTHER; note = 2'-O-methyladenosine
  modified_base 85: mod_base = cm
  modified_base 86: mod_base = cm
  modified_base 87: mod_base = gm
  modified_base 88: mod_base = OTHER; note = 2'-O-methyladenosine
  modified_base 89: mod_base = gm
  modified_base 90: mod_base = um
  modified_base 91: mod_base = cm
  modified_base 92: mod_base = gm
  modified_base 93: mod_base = gm
  modified_base 94: mod_base = um
  modified_base 95: mod_base = gm
  modified_base 96: mod_base = cm
  modified_base 119: mod_base = um
  modified_base 120: mod_base = OTHER; note = Phosphorothioate (PS) linkage
  modified_base 120: mod_base = um
  modified_base 121: mod_base = OTHER; note = Phosphorothioate (PS) linkage
  modified_base 121: mod_base = um
  modified_base 122: mod_base = OTHER; note = Phosphorothioate (PS) linkage
  modified_base 122: mod_base = um
  source 1..122: mol_type = other RNA

SEQ ID NO: 1174 - RNA, 122 nt, synthetic construct; identical to SEQ ID NO: 37
  modified_base 1: mod_base = um
  modified_base 2: mod_base = OTHER; note = Phosphorothioate (PS) linkage
  modified_base 2: mod_base = um
  modified_base 3: mod_base = OTHER; note = Phosphorothioate (PS) linkage
  modified_base 3: mod_base = gm
  modified_base 4: mod_base = OTHER; note = Phosphorothioate (PS) linkage
  modified_base 29: mod_base = gm
  modified_base 30: mod_base = cm
  modified_base 31: mod_base = um
  modified_base 32: mod_base = OTHER; note = 2'-O-methyladenosine
  modified_base 33: mod_base = gm
  modified_base 34: mod_base = OTHER; note = 2'-O-methyladenosine
  modified_base 35: mod_base = OTHER; note = 2'-O-methyladenosine
  modified_base 36: mod_base = OTHER; note = 2'-O-methyladenosine
  modified_base 37: mod_base = um
  modified_base 38: mod_base = OTHER; note = 2'-O-methyladenosine
  modified_base 39: mod_base = gm
  modified_base 40: mod_base = cm
  modified_base 68: mod_base = OTHER; note = 2'-O-methyladenosine
  modified_base 69: mod_base = OTHER; note = 2'-O-methyladenosine
  modified_base 70: mod_base = cm
  modified_base 71: mod_base = um
  modified_base 72: mod_base = um
  modified_base 73: mod_base = gm
  modified_base 74: mod_base = OTHER; note = 2'-O-methyladenosine
  modified_base 75: mod_base = OTHER; note = 2'-O-methyladenosine
  modified_base 76: mod_base = OTHER; note = 2'-O-methyladenosine
  modified_base 77: mod_base = OTHER; note = 2'-O-methyladenosine
  modified_base 78: mod_base = OTHER; note = 2'-O-methyladenosine
  modified_base 79: mod_base = gm
  modified_base 80: mod_base = um
  modified_base 81: mod_base = gm
  modified_base 82: mod_base = gm
  modified_base 83: mod_base = cm
  modified_base 84: mod_base = OTHER; note = 2'-O-methyladenosine
  modified_base 85: mod_base = cm
  modified_base 86: mod_base = cm
  modified_base 87: mod_base = gm
  modified_base 88: mod_base = OTHER; note = 2'-O-methyladenosine
  modified_base 89: mod_base = gm
  modified_base 90: mod_base = um
  modified_base 91: mod_base = cm
  modified_base 92: mod_base = gm
  modified_base 93: mod_base = gm
  modified_base 94: mod_base = um
  modified_base 95: mod_base = gm
  modified_base 96: mod_base = cm
  modified_base 119: mod_base = um
  modified_base 120: mod_base = OTHER; note = Phosphorothioate (PS) linkage
  modified_base 120: mod_base = um
  modified_base 121: mod_base = OTHER; note = Phosphorothioate (PS) linkage
  modified_base 121: mod_base = um
  modified_base 122: mod_base = OTHER; note = Phosphorothioate (PS) linkage
  modified_base 122: mod_base = um
  source 1..122: mol_type = other RNA

SEQ ID NO: 1175 - RNA, 122 nt, synthetic construct; identical to SEQ ID NO: 37
  modified_base 1: mod_base = um
  modified_base 2: mod_base = OTHER; note = Phosphorothioate (PS) linkage
  modified_base 2: mod_base = um
  modified_base 3: mod_base = OTHER; note = Phosphorothioate (PS) linkage
  modified_base 3: mod_base = gm
  modified_base 4: mod_base = OTHER; note = Phosphorothioate (PS) linkage
  modified_base 29: mod_base = gm
  modified_base 30: mod_base = cm
  modified_base 31: mod_base = um
  modified_base 32: mod_base = OTHER; note = 2'-O-methyladenosine
  modified_base 33: mod_base = gm
  modified_base 34: mod_base = OTHER; note = 2'-O-methyladenosine
  modified_base 35: mod_base = OTHER; note = 2'-O-methyladenosine
  modified_base 36: mod_base = OTHER; note = 2'-O-methyladenosine
  modified_base 37: mod_base = um
  modified_base 38: mod_base = OTHER; note = 2'-O-methyladenosine
  modified_base 39: mod_base = gm
  modified_base 40: mod_base = cm
  modified_base 68: mod_base = OTHER; note = 2'-O-methyladenosine
  modified_base 69: mod_base = OTHER; note = 2'-O-methyladenosine
  modified_base 70: mod_base = cm
  modified_base 71: mod_base = um
  modified_base 72: mod_base = um
  modified_base 73: mod_base = gm
  modified_base 74: mod_base = OTHER; note = 2'-O-methyladenosine
  modified_base 75: mod_base = OTHER; note = 2'-O-methyladenosine
  modified_base 76: mod_base = OTHER; note = 2'-O-methyladenosine
  modified_base 77: mod_base = OTHER; note = 2'-O-methyladenosine
  modified_base 78: mod_base = OTHER; note = 2'-O-methyladenosine
  modified_base 79: mod_base = gm
  modified_base 80: mod_base = um
  modified_base 81: mod_base = gm
  modified_base 82: mod_base = gm
  modified_base 83: mod_base = cm
  modified_base 84: mod_base = OTHER; note = 2'-O-methyladenosine
  modified_base 85: mod_base = cm
  modified_base 86: mod_base = cm
  modified_base 87: mod_base = gm
  modified_base 88: mod_base = OTHER; note = 2'-O-methyladenosine
  modified_base 89: mod_base = gm
  modified_base 90: mod_base = um
  modified_base 91: mod_base = cm
  modified_base 92: mod_base = gm
  modified_base 93: mod_base = gm
  modified_base 94: mod_base = um
  modified_base 95: mod_base = gm
  modified_base 96: mod_base = cm
  modified_base 119: mod_base = um
  modified_base 120: mod_base = OTHER; note = Phosphorothioate (PS) linkage
  modified_base 120: mod_base = um
  modified_base 121: mod_base = OTHER; note = Phosphorothioate (PS) linkage
  modified_base 121: mod_base = um
  modified_base 122: mod_base = OTHER; note = Phosphorothioate (PS) linkage
  modified_base 122: mod_base = um
  source 1..122: mol_type = other RNA

SEQ ID NO: 1176 - RNA, 122 nt, synthetic construct; identical to SEQ ID NO: 37
  modified_base 1: mod_base = um
  modified_base 2: mod_base = OTHER; note = Phosphorothioate (PS) linkage
  modified_base 2: mod_base = um
  modified_base 3: mod_base = OTHER; note = Phosphorothioate (PS) linkage
  modified_base 3: mod_base = gm
  modified_base 4: mod_base = OTHER; note = Phosphorothioate (PS) linkage
  modified_base 29: mod_base = gm
  modified_base 30: mod_base = cm
  modified_base 31: mod_base = um
  modified_base 32: mod_base = OTHER; note = 2'-O-methyladenosine
  modified_base 33: mod_base = gm
  modified_base 34: mod_base = OTHER; note = 2'-O-methyladenosine
  modified_base 35: mod_base = OTHER; note = 2'-O-methyladenosine
  modified_base 36: mod_base = OTHER; note = 2'-O-methyladenosine
  modified_base 37: mod_base = um
  modified_base 38: mod_base = OTHER; note = 2'-O-methyladenosine
  modified_base 39: mod_base = gm
  modified_base 40: mod_base = cm
  modified_base 68: mod_base = OTHER; note = 2'-O-methyladenosine
  modified_base 69: mod_base = OTHER; note = 2'-O-methyladenosine
  modified_base 70: mod_base = cm
  modified_base 71: mod_base = um
  modified_base 72: mod_base = um
  modified_base 73: mod_base = gm
  modified_base 74: mod_base = OTHER; note = 2'-O-methyladenosine
  modified_base 75: mod_base = OTHER; note = 2'-O-methyladenosine
  modified_base 76: mod_base = OTHER; note = 2'-O-methyladenosine
  modified_base 77: mod_base = OTHER; note = 2'-O-methyladenosine
  modified_base 78: mod_base = OTHER; note = 2'-O-methyladenosine
  modified_base 79: mod_base = gm
  modified_base 80: mod_base = um
  modified_base 81: mod_base = gm
  modified_base 82: mod_base = gm
  modified_base 83: mod_base = cm
  modified_base 84: mod_base = OTHER; note = 2'-O-methyladenosine
  modified_base 85: mod_base = cm
  modified_base 86: mod_base = cm
  modified_base 87: mod_base = gm
  modified_base 88: mod_base = OTHER; note = 2'-O-methyladenosine
  modified_base 89: mod_base = gm
  modified_base 90: mod_base = um
  modified_base 91: mod_base = cm
  modified_base 92: mod_base = gm
  modified_base 93: mod_base = gm
  modified_base 94: mod_base = um
  modified_base 95: mod_base = gm
  modified_base 96: mod_base = cm
  modified_base 119: mod_base = um
  modified_base 120: mod_base = OTHER; note = Phosphorothioate (PS) linkage
  modified_base 120: mod_base = um
  modified_base 121: mod_base = OTHER; note = Phosphorothioate (PS) linkage
  modified_base 121: mod_base = um
  modified_base 122: mod_base = OTHER; note = Phosphorothioate (PS) linkage
  modified_base 122: mod_base = um
  source 1..122: mol_type = other RNA

SEQ ID NO: 1177 - RNA, 122 nt, synthetic construct; identical to SEQ ID NO: 37
  modified_base 1: mod_base = um
  modified_base 2: mod_base = OTHER; note = Phosphorothioate (PS) linkage
  modified_base 2: mod_base = um
  modified_base 3: mod_base = OTHER; note = Phosphorothioate (PS) linkage
  modified_base 3: mod_base = gm
  modified_base 4: mod_base = OTHER; note = Phosphorothioate (PS) linkage
  modified_base 29: mod_base = gm
  modified_base 30: mod_base = cm
  modified_base 31: mod_base = um
  modified_base 32: mod_base = OTHER; note = 2'-O-methyladenosine
  modified_base 33: mod_base = gm
  modified_base 34: mod_base = OTHER; note = 2'-O-methyladenosine
  modified_base 35: mod_base = OTHER; note = 2'-O-methyladenosine
  modified_base 36: mod_base = OTHER; note = 2'-O-methyladenosine
  modified_base 37: mod_base = um
  modified_base 38: mod_base = OTHER; note = 2'-O-methyladenosine
  modified_base 39: mod_base = gm
  modified_base 40: mod_base = cm
  modified_base 68: mod_base = OTHER; note = 2'-O-methyladenosine
  modified_base 69: mod_base = OTHER; note = 2'-O-methyladenosine
  modified_base 70: mod_base = cm
  modified_base 71: mod_base = um
  modified_base 72: mod_base = um
  modified_base 73: mod_base = gm
  modified_base 74: mod_base = OTHER; note = 2'-O-methyladenosine
  modified_base 75: mod_base = OTHER; note = 2'-O-methyladenosine
  modified_base 76: mod_base = OTHER; note = 2'-O-methyladenosine
  modified_base 77: mod_base = OTHER; note = 2'-O-methyladenosine
  modified_base 78: mod_base = OTHER; note = 2'-O-methyladenosine
  modified_base 79: mod_base = gm
  modified_base 80: mod_base = um
  modified_base 81: mod_base = gm
  modified_base 82: mod_base = gm
  modified_base 83: mod_base = cm
  modified_base 84: mod_base = OTHER; note = 2'-O-methyladenosine
  modified_base 85: mod_base = cm
  modified_base 86: mod_base = cm
  modified_base 87: mod_base = gm
  modified_base 88: mod_base = OTHER; note = 2'-O-methyladenosine
  modified_base 89: mod_base = gm
  modified_base 90: mod_base = um
  modified_base 91: mod_base = cm
  modified_base 92: mod_base = gm
  modified_base 93: mod_base = gm
  modified_base 94: mod_base = um
  modified_base 95: mod_base = gm
  modified_base 96: mod_base = cm
  modified_base 119: mod_base = um
  modified_base 120: mod_base = OTHER; note = Phosphorothioate (PS) linkage
  modified_base 120: mod_base = um
  modified_base 121: mod_base = OTHER; note = Phosphorothioate (PS) linkage
  modified_base 121: mod_base = um
  modified_base 122: mod_base = OTHER; note = Phosphorothioate (PS) linkage
  modified_base 122: mod_base = um
  source 1..122: mol_type = other RNA

SEQ ID NO: 1178 - RNA, 122 nt, synthetic construct; identical to SEQ ID NO: 37
  modified_base 1: mod_base = um
  modified_base 2: mod_base = OTHER; note = Phosphorothioate (PS) linkage
  modified_base 2: mod_base = um
  modified_base 3: mod_base = OTHER; note = Phosphorothioate (PS) linkage
  modified_base 3: mod_base = gm
  modified_base 4: mod_base = OTHER; note = Phosphorothioate (PS) linkage
  modified_base 29: mod_base = gm
  modified_base 30: mod_base = cm
  modified_base 31: mod_base = um
  modified_base 32: mod_base = OTHER; note = 2'-O-methyladenosine
  modified_base 33: mod_base = gm
  modified_base 34: mod_base = OTHER; note = 2'-O-methyladenosine
  modified_base 35: mod_base = OTHER; note = 2'-O-methyladenosine
  modified_base 36: mod_base = OTHER; note = 2'-O-methyladenosine
  modified_base 37: mod_base = um
  modified_base 38: mod_base = OTHER; note = 2'-O-methyladenosine
  modified_base 39: mod_base = gm
  modified_base 40: mod_base = cm
  modified_base 68: mod_base = OTHER; note = 2'-O-methyladenosine
  modified_base 69: mod_base = OTHER; note = 2'-O-methyladenosine
  modified_base 70: mod_base = cm
  modified_base 71: mod_base = um
  modified_base 72: mod_base = um
  modified_base 73: mod_base = gm
  modified_base 74: mod_base = OTHER; note = 2'-O-methyladenosine
  modified_base 75: mod_base = OTHER; note = 2'-O-methyladenosine
  modified_base 76: mod_base = OTHER; note = 2'-O-methyladenosine
  modified_base 77: mod_base = OTHER; note = 2'-O-methyladenosine
  modified_base 78: mod_base = OTHER; note = 2'-O-methyladenosine
  modified_base 79: mod_base = gm
  modified_base 80: mod_base = um
  modified_base 81: mod_base = gm
  modified_base 82: mod_base = gm
  modified_base 83: mod_base = cm
  modified_base 84: mod_base = OTHER; note = 2'-O-methyladenosine
  modified_base 85: mod_base = cm
  modified_base 86: mod_base = cm
  modified_base 87: mod_base = gm
  modified_base 88: mod_base = OTHER; note = 2'-O-methyladenosine
  modified_base 89: mod_base = gm
  modified_base 90: mod_base = um
  modified_base 91: mod_base = cm
  modified_base 92: mod_base = gm
  modified_base 93: mod_base = gm
  modified_base 94: mod_base = um
  modified_base 95: mod_base = gm
  modified_base 96: mod_base = cm
  modified_base 119: mod_base = um
  modified_base 120: mod_base = OTHER; note = Phosphorothioate (PS) linkage
  modified_base 120: mod_base = um
  modified_base 121: mod_base = OTHER; note = Phosphorothioate (PS) linkage
  modified_base 121: mod_base = um
  modified_base 122: mod_base = OTHER; note = Phosphorothioate (PS) linkage
  modified_base 122: mod_base = um
  source 1..122: mol_type = other RNA

SEQ ID NO: 1179 - RNA, 122 nt, synthetic construct; identical to SEQ ID NO: 37
  modified_base 1: mod_base = um
  modified_base 2: mod_base = OTHER; note = Phosphorothioate (PS) linkage
  modified_base 2: mod_base = um
  modified_base 3: mod_base = OTHER; note = Phosphorothioate (PS) linkage
  modified_base 3: mod_base = gm
  modified_base 4: mod_base = OTHER; note = Phosphorothioate (PS) linkage
  modified_base 29: mod_base = gm
  modified_base 30: mod_base = cm
  modified_base 31: mod_base = um
  modified_base 32: mod_base = OTHER; note = 2'-O-methyladenosine
  modified_base 33: mod_base = gm
  modified_base 34: mod_base = OTHER; note = 2'-O-methyladenosine
  modified_base 35: mod_base = OTHER; note = 2'-O-methyladenosine
  modified_base 36: mod_base = OTHER; note = 2'-O-methyladenosine
  modified_base 37: mod_base = um
  modified_base 38: mod_base = OTHER; note = 2'-O-methyladenosine
  modified_base 39: mod_base = gm
  modified_base 40: mod_base = cm
  modified_base 68: mod_base = OTHER; note = 2'-O-methyladenosine
  modified_base 69: mod_base = OTHER; note = 2'-O-methyladenosine
  modified_base 70: mod_base = cm
  modified_base 71: mod_base = um
  modified_base 72: mod_base = um
  modified_base 73: mod_base = gm
  modified_base 74: mod_base = OTHER; note = 2'-O-methyladenosine
  modified_base 75: mod_base = OTHER; note = 2'-O-methyladenosine
  modified_base 76: mod_base = OTHER; note = 2'-O-methyladenosine
  modified_base 77: mod_base = OTHER; note = 2'-O-methyladenosine
  modified_base 78: mod_base = OTHER; note = 2'-O-methyladenosine
  modified_base 79: mod_base = gm
  modified_base 80: mod_base = um
  modified_base 81: mod_base = gm
  modified_base 82: mod_base = gm
  modified_base 83: mod_base = cm
  modified_base 84: mod_base = OTHER; note = 2'-O-methyladenosine
  modified_base 85: mod_base = cm
  modified_base 86: mod_base = cm
  modified_base 87: mod_base = gm
  modified_base 88: mod_base = OTHER; note = 2'-O-methyladenosine
  modified_base 89: mod_base = gm
  modified_base 90: mod_base = um
  modified_base 91: mod_base = cm
  modified_base 92: mod_base = gm
  modified_base 93: mod_base = gm
  modified_base 94: mod_base = um
  modified_base 95: mod_base = gm
  modified_base 96: mod_base = cm
  modified_base 111: mod_base = OTHER; note = 2' fluoro modified base
  modified_base 115: mod_base = OTHER; note = 2' fluoro modified base
  modified_base 116: mod_base = OTHER; note = 2' fluoro modified base
  modified_base 119: mod_base = um
  modified_base 120: mod_base = OTHER; note = Phosphorothioate (PS) linkage
  modified_base 120: mod_base = um
  modified_base 121: mod_base = OTHER; note = Phosphorothioate (PS) linkage
  modified_base 121: mod_base = um
  modified_base 122: mod_base = OTHER; note = Phosphorothioate (PS) linkage
  modified_base 122: mod_base = um
  source 1..122: mol_type = other RNA

SEQ ID NO: 1180 - RNA, 122 nt, synthetic construct; identical to SEQ ID NO: 37
  modified_base 1: mod_base = um
  modified_base 2: mod_base = OTHER; note = Phosphorothioate (PS) linkage
  modified_base 2: mod_base = um
  modified_base 3: mod_base = OTHER; note = Phosphorothioate (PS) linkage
  modified_base 3: mod_base = gm
  modified_base 4: mod_base = OTHER; note = Phosphorothioate (PS) linkage
  modified_base 29: mod_base = gm
  modified_base 30: mod_base = cm
  modified_base 31: mod_base = um
  modified_base 32: mod_base = OTHER; note = 2'-O-methyladenosine
  modified_base 33: mod_base = gm
  modified_base 34: mod_base = OTHER; note = 2'-O-methyladenosine
  modified_base 35: mod_base = OTHER; note = 2'-O-methyladenosine
  modified_base 36: mod_base = OTHER; note = 2'-O-methyladenosine
  modified_base 37: mod_base = um
  modified_base 38: mod_base = OTHER; note = 2'-O-methyladenosine
  modified_base 39: mod_base = gm
  modified_base 40: mod_base = cm
  modified_base 68: mod_base = OTHER; note = 2'-O-methyladenosine
  modified_base 69: mod_base = OTHER; note = 2'-O-methyladenosine
  modified_base 70: mod_base = cm
  modified_base 71: mod_base = um
  modified_base 72: mod_base = um
  modified_base 73: mod_base = gm
  modified_base 74: mod_base = OTHER; note = 2'-O-methyladenosine
  modified_base 75: mod_base = OTHER; note = 2'-O-methyladenosine
  modified_base 76: mod_base = OTHER; note = 2'-O-methyladenosine
  modified_base 77: mod_base = OTHER; note = 2'-O-methyladenosine
  modified_base 78: mod_base = OTHER; note = 2'-O-methyladenosine
  modified_base 79: mod_base = gm
  modified_base 80: mod_base = um
  modified_base 81: mod_base = gm
  modified_base 82: mod_base = gm
  modified_base 83: mod_base = cm
  modified_base 84: mod_base = OTHER; note = 2'-O-methyladenosine
  modified_base 85: mod_base = cm
  modified_base 86: mod_base = cm
  modified_base 87: mod_base = gm
  modified_base 88: mod_base = OTHER; note = 2'-O-methyladenosine
  modified_base 89: mod_base = gm
  modified_base 90: mod_base = um
  modified_base 91: mod_base = cm
  modified_base 92: mod_base = gm
  modified_base 93: mod_base = gm
  modified_base 94: mod_base = um
  modified_base 95: mod_base = gm
  modified_base 96: mod_base = cm
  modified_base 111: mod_base = OTHER; note = 2' fluoro modified base
  modified_base 114: mod_base = gm
  modified_base 115: mod_base = OTHER; note = 2' fluoro modified base
  modified_base 116: mod_base = OTHER; note = 2' fluoro modified base
  modified_base 117: mod_base = gm
  modified_base 118: mod_base = cm
  modified_base 119: mod_base = um
  modified_base 120: mod_base = OTHER; note = Phosphorothioate (PS) linkage
  modified_base 120: mod_base = um
  modified_base 121: mod_base = OTHER; note = Phosphorothioate (PS) linkage
  modified_base 121: mod_base = um
  modified_base 122: mod_base = OTHER; note = Phosphorothioate (PS) linkage
  modified_base 122: mod_base = um
  source 1..122: mol_type = other RNA

SEQ ID NO: 1181 - RNA, 122 nt, synthetic construct; identical to SEQ ID NO: 37
  modified_base 1: mod_base = um
  modified_base 2: mod_base = OTHER; note = Phosphorothioate (PS) linkage
  modified_base 2: mod_base = um
  modified_base 3: mod_base = OTHER; note = Phosphorothioate (PS) linkage
  modified_base 3: mod_base = gm
  modified_base 4: mod_base = OTHER; note = Phosphorothioate (PS) linkage
  modified_base 29: mod_base = gm
  modified_base 30: mod_base = cm
  modified_base 31: mod_base = um
  modified_base 32: mod_base = OTHER; note = 2'-O-methyladenosine
  modified_base 33: mod_base = gm
  modified_base 34: mod_base = OTHER; note = 2'-O-methyladenosine
  modified_base 35: mod_base = OTHER; note = 2'-O-methyladenosine
  modified_base 36: mod_base = OTHER; note = 2'-O-methyladenosine
  modified_base 37: mod_base = um
  modified_base 38: mod_base = OTHER; note = 2'-O-methyladenosine
  modified_base 39: mod_base = gm
  modified_base 40: mod_base = cm
  modified_base 68: mod_base = OTHER; note = 2'-O-methyladenosine
  modified_base 69: mod_base = OTHER; note = 2'-O-methyladenosine
  modified_base 70: mod_base = cm
  modified_base 71: mod_base = um
  modified_base 72: mod_base = um
  modified_base 73: mod_base = gm
  modified_base 74: mod_base = OTHER; note = 2'-O-methyladenosine
  modified_base 75: mod_base = OTHER; note = 2'-O-methyladenosine
  modified_base 76: mod_base = OTHER; note = 2'-O-methyladenosine
  modified_base 77: mod_base = OTHER; note = 2'-O-methyladenosine
  modified_base 78: mod_base = OTHER; note = 2'-O-methyladenosine
  modified_base 79: mod_base = gm
  modified_base 80: mod_base = um
  modified_base 81: mod_base = gm
  modified_base 82: mod_base = gm
  modified_base 83: mod_base = cm
  modified_base 84: mod_base = OTHER; note = 2'-O-methyladenosine
  modified_base 85: mod_base = cm
  modified_base 86: mod_base = cm
  modified_base 87: mod_base = gm
  modified_base 88: mod_base = OTHER; note = 2'-O-methyladenosine
  modified_base 89: mod_base = gm
  modified_base 90: mod_base = um
  modified_base 91: mod_base = cm
  modified_base 92: mod_base = gm
  modified_base 93: mod_base = gm
  modified_base 94: mod_base = um
  modified_base 95: mod_base = gm
  modified_base 96: mod_base = cm
  modified_base 115: mod_base = OTHER; note = 2' fluoro modified base
  modified_base 119: mod_base = um
  modified_base 120: mod_base = OTHER; note = Phosphorothioate (PS) linkage
  modified_base 120: mod_base = um
  modified_base 121: mod_base = OTHER; note = Phosphorothioate (PS) linkage
  modified_base 121: mod_base = um
  modified_base 122: mod_base = OTHER; note = Phosphorothioate (PS) linkage
  modified_base 122: mod_base = OTHER; note = 3' inverted deoxythymidine
  source 1..122: mol_type = other RNA

SEQ ID NO: 1182 - RNA, 119 nt, synthetic construct
  modified_base 1: mod_base = um
  modified_base 2: mod_base = OTHER; note = Phosphorothioate (PS) linkage
  modified_base 2: mod_base = um
  modified_base 3: mod_base = OTHER; note = Phosphorothioate (PS) linkage
  modified_base 3: mod_base = gm
  modified_base 4: mod_base = OTHER; note = Phosphorothioate (PS) linkage
  modified_base 29: mod_base = gm
  modified_base 30: mod_base = cm
  modified_base 31: mod_base = um
  modified_base 32: mod_base = OTHER; note = 2'-O-methyladenosine
  modified_base 33: mod_base = gm
  modified_base 34: mod_base = OTHER; note = 2'-O-methyladenosine
  modified_base 35: mod_base = OTHER; note = 2'-O-methyladenosine
  modified_base 36: mod_base = OTHER; note = 2'-O-methyladenosine
  modified_base 37: mod_base = um
  modified_base 38: mod_base = OTHER; note = 2'-O-methyladenosine
  modified_base 39: mod_base = gm
  modified_base 40: mod_base = cm
  modified_base 68: mod_base = OTHER; note = 2'-O-methyladenosine
  modified_base 69: mod_base = OTHER; note = 2'-O-methyladenosine
  modified_base 70: mod_base = cm
  modified_base 71: mod_base = um
  modified_base 72: mod_base = um
  modified_base 73: mod_base = gm
  modified_base 74: mod_base = OTHER; note = 2'-O-methyladenosine
  modified_base 75: mod_base = OTHER; note = 2'-O-methyladenosine
  modified_base 76: mod_base = OTHER; note = 2'-O-methyladenosine
  modified_base 77: mod_base = OTHER; note = 2'-O-methyladenosine
  modified_base 78: mod_base = OTHER; note = 2'-O-methyladenosine
  modified_base 79: mod_base = gm
  modified_base 80: mod_base = um
  modified_base 81: mod_base = gm
  modified_base 82: mod_base = gm
  modified_base 83: mod_base = cm
  modified_base 84: mod_base = OTHER; note = 2'-O-methyladenosine
  modified_base 85: mod_base = cm
  modified_base 86: mod_base = cm
  modified_base 87: mod_base = gm
  modified_base 88: mod_base = OTHER; note = 2'-O-methyladenosine
  modified_base 89: mod_base = gm
  modified_base 90: mod_base = um
  modified_base 91: mod_base = cm
  modified_base 92: mod_base = gm
  modified_base 93: mod_base = gm
  modified_base 94: mod_base = um
  modified_base 95: mod_base = gm
  modified_base 96: mod_base = cm
  modified_base 115: mod_base = OTHER; note = 2' fluoro modified base
  modified_base 116: mod_base = gm
  modified_base 117: mod_base = OTHER; note = Phosphorothioate (PS) linkage
  modified_base 117: mod_base = gm
  modified_base 118: mod_base = OTHER; note = Phosphorothioate (PS) linkage
  modified_base 118: mod_base = cm
  modified_base 119: mod_base = OTHER; note = Phosphorothioate (PS) linkage
  modified_base 119: mod_base = OTHER; note = 3' inverted deoxythymidine
  source 1..119: mol_type = other RNA
ttggtgactgccacgcccaagttttagagctagaaatagcaagttaaaataaggctagtccgttatcaacttgaaaaagtggcaccgagtcggtgcgtgaacaccccttgggcgtggct

SEQ ID NO: 1183 - RNA, 122 nt, synthetic construct; identical to SEQ ID NO: 37
  modified_base 1: mod_base = um
  modified_base 2: mod_base = OTHER; note = Phosphorothioate (PS) linkage
  modified_base 2: mod_base = um
  modified_base 3: mod_base = OTHER; note = Phosphorothioate (PS) linkage
  modified_base 3: mod_base = gm
  modified_base 4: mod_base = OTHER; note = Phosphorothioate (PS) linkage
  modified_base 29: mod_base = gm
  modified_base 30: mod_base = cm
  modified_base 31: mod_base = um
  modified_base 32: mod_base = OTHER; note = 2'-O-methyladenosine
  modified_base 33: mod_base = gm
  modified_base 34: mod_base = OTHER; note = 2'-O-methyladenosine
  modified_base 35: mod_base = OTHER; note = 2'-O-methyladenosine
  modified_base 36: mod_base = OTHER; note = 2'-O-methyladenosine
  modified_base 37: mod_base = um
  modified_base 38: mod_base = OTHER; note = 2'-O-methyladenosine
  modified_base 39: mod_base = gm
  modified_base 40: mod_base = cm
  modified_base 68: mod_base = OTHER; note = 2'-O-methyladenosine
  modified_base 69: mod_base = OTHER; note = 2'-O-methyladenosine
  modified_base 70: mod_base = cm
  modified_base 71: mod_base = um
  modified_base 72: mod_base = um
  modified_base 73: mod_base = gm
  modified_base 74: mod_base = OTHER; note = 2'-O-methyladenosine
  modified_base 75: mod_base = OTHER; note = 2'-O-methyladenosine
  modified_base 76: mod_base = OTHER; note = 2'-O-methyladenosine
  modified_base 77: mod_base = OTHER; note = 2'-O-methyladenosine
  modified_base 78: mod_base = OTHER; note = 2'-O-methyladenosine
  modified_base 79: mod_base = gm
  modified_base 80: mod_base = um
  modified_base 81: mod_base = gm
  modified_base 82: mod_base = gm
  modified_base 83: mod_base = cm
  modified_base 84: mod_base = OTHER; note = 2'-O-methyladenosine
  modified_base 85: mod_base = cm
  modified_base 86: mod_base = cm
  modified_base 87: mod_base = gm
  modified_base 88: mod_base = OTHER; note = 2'-O-methyladenosine
  modified_base 89: mod_base = gm
  modified_base 90: mod_base = um
  modified_base 91: mod_base = cm
  modified_base 92: mod_base = gm
  modified_base 93: mod_base = gm
  modified_base 94: mod_base = um
  modified_base 95: mod_base = gm
  modified_base 96: mod_base = cm
  modified_base 111: mod_base = OTHER; note = 2' fluoro modified base
  modified_base 116: mod_base = OTHER; note = 2' fluoro modified base
  modified_base 119: mod_base = um
  modified_base 120: mod_base = OTHER; note = Phosphorothioate (PS) linkage
  modified_base 120: mod_base = um
  modified_base 121: mod_base = OTHER; note = Phosphorothioate (PS) linkage
  modified_base 121: mod_base = um
  modified_base 122: mod_base = OTHER; note = Phosphorothioate (PS) linkage
  modified_base 122: mod_base = OTHER; note = 3' inverted deoxythymidine
  source 1..122: mol_type = other RNA

SEQ ID NO: 1184 - RNA, 121 nt, synthetic construct; identical to SEQ ID NO: 1125
  modified_base 1: mod_base = um
  modified_base 2: mod_base = OTHER; note = Phosphorothioate (PS) linkage
  modified_base 2: mod_base = um
  modified_base 3: mod_base = OTHER; note = Phosphorothioate (PS) linkage
  modified_base 3: mod_base = gm
  modified_base 4: mod_base = OTHER; note = Phosphorothioate (PS) linkage
  modified_base 29: mod_base = gm
  modified_base 30: mod_base = cm
  modified_base 31: mod_base = um
  modified_base 32: mod_base = OTHER; note = 2'-O-methyladenosine
  modified_base 33: mod_base = gm
  modified_base 34: mod_base = OTHER; note = 2'-O-methyladenosine
  modified_base 35: mod_base = OTHER; note = 2'-O-methyladenosine
  modified_base 36: mod_base = OTHER; note = 2'-O-methyladenosine
  modified_base 37: mod_base = um
  modified_base 38: mod_base = OTHER; note = 2'-O-methyladenosine
  modified_base 39: mod_base = gm
  modified_base 40: mod_base = cm
  modified_base 68: mod_base = OTHER; note = 2'-O-methyladenosine
  modified_base 69: mod_base = OTHER; note = 2'-O-methyladenosine
  modified_base 70: mod_base = cm
  modified_base 71: mod_base = um
  modified_base 72: mod_base = um
  modified_base 73: mod_base = gm
  modified_base 74: mod_base = OTHER; note = 2'-O-methyladenosine
  modified_base 75: mod_base = OTHER; note = 2'-O-methyladenosine
  modified_base 76: mod_base = OTHER; note = 2'-O-methyladenosine
  modified_base 77: mod_base = OTHER; note = 2'-O-methyladenosine
  modified_base 78: mod_base = OTHER; note = 2'-O-methyladenosine
  modified_base 79: mod_base = gm
  modified_base 80: mod_base = um
  modified_base 81: mod_base = gm
  modified_base 82: mod_base = gm
  modified_base 83: mod_base = cm
  modified_base 84: mod_base = OTHER; note = 2'-O-methyladenosine
  modified_base 85: mod_base = cm
  modified_base 86: mod_base = cm
  modified_base 87: mod_base = gm
  modified_base 88: mod_base = OTHER; note = 2'-O-methyladenosine
  modified_base 89: mod_base = gm
  modified_base 90: mod_base = um
  modified_base 91: mod_base = cm
  modified_base 92: mod_base = gm
  modified_base 93: mod_base = gm
  modified_base 94: mod_base = um
  modified_base 95: mod_base = gm
  modified_base 96: mod_base = cm
  modified_base 111: mod_base = OTHER; note = 2' fluoro modified base
  modified_base 116: mod_base = OTHER; note = 2' fluoro modified base
  modified_base 117: mod_base = gm
  modified_base 118: mod_base = cm
  modified_base 119: mod_base = OTHER; note = Phosphorothioate (PS) linkage
  modified_base 119: mod_base = um
  modified_base 120: mod_base = OTHER; note = Phosphorothioate (PS) linkage
  modified_base 120: mod_base = um
  modified_base 121: mod_base = OTHER; note = Phosphorothioate (PS) linkage
  modified_base 121: mod_base = OTHER; note = 3' inverted deoxythymidine
  source 1..121: mol_type = other RNA

SEQ ID NO: 1185 - RNA, 120 nt, synthetic construct
  modified_base 1: mod_base = um
  modified_base 2: mod_base = OTHER; note = Phosphorothioate (PS) linkage
  modified_base 2: mod_base = um
  modified_base 3: mod_base = OTHER; note = Phosphorothioate (PS) linkage
  modified_base 3: mod_base = gm
  modified_base 4: mod_base = OTHER; note = Phosphorothioate (PS) linkage
  modified_base 29: mod_base = gm
  modified_base 30: mod_base = cm
  modified_base 31: mod_base = um
  modified_base 32: mod_base = OTHER; note = 2'-O-methyladenosine
  modified_base 33: mod_base = gm
  modified_base 34: mod_base = OTHER; note = 2'-O-methyladenosine
  modified_base 35: mod_base = OTHER; note = 2'-O-methyladenosine
  modified_base 36: mod_base = OTHER; note = 2'-O-methyladenosine
  modified_base 37: mod_base = um
  modified_base 38: mod_base = OTHER; note = 2'-O-methyladenosine
  modified_base 39: mod_base = gm
  modified_base 40: mod_base = cm
  modified_base 68: mod_base = OTHER; note = 2'-O-methyladenosine
  modified_base 69: mod_base = OTHER; note = 2'-O-methyladenosine
  modified_base 70: mod_base = cm
  modified_base 71: mod_base = um
  modified_base 72: mod_base = um
  modified_base 73: mod_base = gm
  modified_base 74: mod_base = OTHER; note = 2'-O-methyladenosine
  modified_base 75: mod_base = OTHER; note = 2'-O-methyladenosine
  modified_base 76: mod_base = OTHER; note = 2'-O-methyladenosine
  modified_base 77: mod_base = OTHER; note = 2'-O-methyladenosine
  modified_base 78: mod_base = OTHER; note = 2'-O-methyladenosine
  modified_base 79: mod_base = gm
  modified_base 80: mod_base = um
  modified_base 81: mod_base = gm
  modified_base 82: mod_base = gm
  modified_base 83: mod_base = cm
  modified_base 84: mod_base = OTHER; note = 2'-O-methyladenosine
  modified_base 85: mod_base = cm
  modified_base 86: mod_base = cm
  modified_base 87: mod_base = gm
  modified_base 88: mod_base = OTHER; note = 2'-O-methyladenosine
  modified_base 89: mod_base = gm
  modified_base 90: mod_base = um
  modified_base 91: mod_base = cm
  modified_base 92: mod_base = gm
  modified_base 93: mod_base = gm
  modified_base 94: mod_base = um
  modified_base 95: mod_base = gm
  modified_base 96: mod_base = cm
  modified_base 111: mod_base = OTHER; note = 2' fluoro modified base
  modified_base 116: mod_base = OTHER; note = 2' fluoro modified base
  modified_base 117: mod_base = gm
  modified_base 118: mod_base = OTHER; note = Phosphorothioate (PS) linkage
  modified_base 118: mod_base = cm
  modified_base 119: mod_base = OTHER; note = Phosphorothioate (PS) linkage
  modified_base 119: mod_base = um
  modified_base 120: mod_base = OTHER; note = Phosphorothioate (PS) linkage
  modified_base 120: mod_base = OTHER; note = 3' inverted deoxythymidine
  source 1..120: mol_type = other RNA
ttggtgactgccacgcccaagttttagagctagaaatagcaagttaaaataaggctagtccgttatcaacttgaaaaagtggcaccgagtcggtgcgtgaacaccccttgggcgtggctt

SEQ ID NO: 1186 - RNA, 119 nt, synthetic construct; identical to SEQ ID NO: 1182
  modified_base 1: mod_base = um
  modified_base 2: mod_base = OTHER; note = Phosphorothioate (PS) linkage
  modified_base 2: mod_base = um
  modified_base 3: mod_base = OTHER; note = Phosphorothioate (PS) linkage
  modified_base 3: mod_base = gm
  modified_base 4: mod_base = OTHER; note = Phosphorothioate (PS) linkage
  modified_base 29: mod_base = gm
  modified_base 30: mod_base = cm
  modified_base 31: mod_base = um
  modified_base 32: mod_base = OTHER; note = 2'-O-methyladenosine
  modified_base 33: mod_base = gm
  modified_base 34: mod_base = OTHER; note = 2'-O-methyladenosine
  modified_base 35: mod_base = OTHER; note = 2'-O-methyladenosine
  modified_base 36: mod_base = OTHER; note = 2'-O-methyladenosine
  modified_base 37: mod_base = um
  modified_base 38: mod_base = OTHER; note = 2'-O-methyladenosine
  modified_base 39: mod_base = gm
  modified_base 40: mod_base = cm
  modified_base 68: mod_base = OTHER; note = 2'-O-methyladenosine
  modified_base 69: mod_base = OTHER; note = 2'-O-methyladenosine
  modified_base 70: mod_base = cm
  modified_base 71: mod_base = um
  modified_base 72: mod_base = um
  modified_base 73: mod_base = gm
  modified_base 74: mod_base = OTHER; note = 2'-O-methyladenosine
  modified_base 75: mod_base = OTHER; note = 2'-O-methyladenosine
  modified_base 76: mod_base = OTHER; note = 2'-O-methyladenosine
  modified_base 77: mod_base = OTHER; note = 2'-O-methyladenosine
  modified_base 78: mod_base = OTHER; note = 2'-O-methyladenosine
  modified_base 79: mod_base = gm
  modified_base 80: mod_base = um
  modified_base 81: mod_base = gm
  modified_base 82: mod_base = gm
  modified_base 83: mod_base = cm
  modified_base 84: mod_base = OTHER; note = 2'-O-methyladenosine
  modified_base 85: mod_base = cm
  modified_base 86: mod_base = cm
  modified_base 87: mod_base = gm
  modified_base 88: mod_base = OTHER; note = 2'-O-methyladenosine
  modified_base 89: mod_base = gm
  modified_base 90: mod_base = um
  modified_base 91: mod_base = cm
  modified_base 92: mod_base = gm
  modified_base 93: mod_base = gm
  modified_base 94: mod_base = um
  modified_base 95: mod_base = gm
  modified_base 96: mod_base = cm
  modified_base 111: mod_base = OTHER; note = 2' fluoro modified base
  modified_base 115: mod_base = OTHER; note = 2' fluoro modified base
  modified_base 116: mod_base = OTHER; note = 2' fluoro modified base
  modified_base 117: mod_base = OTHER; note = Phosphorothioate (PS) linkage
  modified_base 117: mod_base = gm
  modified_base 118: mod_base = OTHER; note = Phosphorothioate (PS) linkage
  modified_base 118: mod_base = cm
  modified_base 119: mod_base = OTHER; note = Phosphorothioate (PS) linkage
  modified_base 119: mod_base = OTHER; note = 3' inverted deoxythymidine
  source 1..119: mol_type = other RNA

SEQ ID NO: 1187 - RNA, 119 nt, synthetic construct; identical to SEQ ID NO: 1182
  modified_base 1: mod_base = um
  modified_base 2: mod_base = OTHER; note = Phosphorothioate (PS) linkage
  modified_base 2: mod_base = um
  modified_base 3: mod_base = OTHER; note = Phosphorothioate (PS) linkage
  modified_base 3: mod_base = gm
  modified_base 4: mod_base = OTHER; note = Phosphorothioate (PS) linkage
  modified_base 29: mod_base = gm
  modified_base 30: mod_base = cm
  modified_base 31: mod_base = um
  modified_base 32: mod_base = OTHER; note = 2'-O-methyladenosine
  modified_base 33: mod_base = gm
  modified_base 34: mod_base = OTHER; note = 2'-O-methyladenosine
  modified_base 35: mod_base = OTHER; note = 2'-O-methyladenosine
  modified_base 36: mod_base = OTHER; note = 2'-O-methyladenosine
  modified_base 37: mod_base = um
  modified_base 38: mod_base = OTHER; note = 2'-O-methyladenosine
  modified_base 39: mod_base = gm
  modified_base 40: mod_base = cm
  modified_base 68: mod_base = OTHER; note = 2'-O-methyladenosine
  modified_base 69: mod_base = OTHER; note = 2'-O-methyladenosine
  modified_base 70: mod_base = cm
  modified_base 71: mod_base = um
  modified_base 72: mod_base = um
  modified_base 73: mod_base = gm
  modified_base 74: mod_base = OTHER; note = 2'-O-methyladenosine
  modified_base 75: mod_base = OTHER; note = 2'-O-methyladenosine
  modified_base 76: mod_base = OTHER; note = 2'-O-methyladenosine
  modified_base 77: mod_base = OTHER; note = 2'-O-methyladenosine
  modified_base 78: mod_base = OTHER; note = 2'-O-methyladenosine
  modified_base 79: mod_base = gm
  modified_base 80: mod_base = um
  modified_base 81: mod_base = gm
  modified_base 82: mod_base = gm
  modified_base 83: mod_base = cm
  modified_base 84: mod_base = OTHER; note = 2'-O-methyladenosine
  modified_base 85: mod_base = cm
  modified_base 86: mod_base = cm
  modified_base 87: mod_base = gm
  modified_base 88: mod_base = OTHER; note = 2'-O-methyladenosine
  modified_base 89: mod_base = gm
  modified_base 90: mod_base = um
  modified_base 91: mod_base = cm
  modified_base 92: mod_base = gm
  modified_base 93: mod_base = gm
  modified_base 94: mod_base = um
  modified_base 95: mod_base = gm
  modified_base 96: mod_base = cm
  modified_base 111: mod_base = OTHER; note = 2' fluoro modified base
  modified_base 116: mod_base = OTHER; note = 2' fluoro modified base
  modified_base 117: mod_base = OTHER; note = Phosphorothioate (PS) linkage
  modified_base 117: mod_base = gm
  modified_base 118: mod_base = OTHER; note = Phosphorothioate (PS) linkage
  modified_base 118: mod_base = cm
  modified_base 119: mod_base = OTHER; note = Phosphorothioate (PS) linkage
  modified_base 119: mod_base = OTHER; note = 3' inverted deoxythymidine
  source 1..119: mol_type = other RNA

SEQ ID NO: 1188 - RNA, 119 nt, synthetic construct; identical to SEQ ID NO: 1182
  modified_base 1: mod_base = um
  modified_base 2: mod_base = OTHER; note = Phosphorothioate (PS) linkage
  modified_base 2: mod_base = um
  modified_base 3: mod_base = OTHER; note = Phosphorothioate (PS) linkage
  modified_base 3: mod_base = gm
  modified_base 4: mod_base = OTHER; note = Phosphorothioate (PS) linkage
  modified_base 29: mod_base = gm
  modified_base 30: mod_base = cm
  modified_base 31: mod_base = um
  modified_base 32: mod_base = OTHER; note = 2'-O-methyladenosine
  modified_base 33: mod_base = gm
  modified_base 34: mod_base = OTHER; note = 2'-O-methyladenosine
  modified_base 35: mod_base = OTHER; note = 2'-O-methyladenosine
  modified_base 36: mod_base = OTHER; note = 2'-O-methyladenosine
  modified_base 37: mod_base = um
  modified_base 38: mod_base = OTHER; note = 2'-O-methyladenosine
  modified_base 39: mod_base = gm
  modified_base 40: mod_base = cm
  modified_base 68: mod_base = OTHER; note = 2'-O-methyladenosine
  modified_base 69: mod_base = OTHER; note = 2'-O-methyladenosine
  modified_base 70: mod_base = cm
  modified_base 71: mod_base = um
  modified_base 72: mod_base = um
  modified_base 73: mod_base = gm
  modified_base 74: mod_base = OTHER; note = 2'-O-methyladenosine
  modified_base 75: mod_base = OTHER; note = 2'-O-methyladenosine
  modified_base 76: mod_base = OTHER; note = 2'-O-methyladenosine
  modified_base 77: mod_base = OTHER; note = 2'-O-methyladenosine
  modified_base 78: mod_base = OTHER; note = 2'-O-methyladenosine
  modified_base 79: mod_base = gm
  modified_base 80: mod_base = um
  modified_base 81: mod_base = gm
  modified_base 82: mod_base = gm
  modified_base 83: mod_base = cm
  modified_base 84: mod_base = OTHER; note = 2'-O-methyladenosine
  modified_base 85: mod_base = cm
  modified_base 86: mod_base = cm
  modified_base 87: mod_base = gm
  modified_base 88: mod_base = OTHER; note = 2'-O-methyladenosine
  modified_base 89: mod_base = gm
  modified_base 90: mod_base = um
  modified_base 91: mod_base = cm
  modified_base 92: mod_base = gm
  modified_base 93: mod_base = gm
  modified_base 94: mod_base = um
  modified_base 95: mod_base = gm
  modified_base 96: mod_base = cm
  modified_base 111: mod_base = OTHER; note = 2' fluoro modified base
  modified_base 116: mod_base = OTHER; note = 2' fluoro modified base
  modified_base 117: mod_base = gm
  modified_base 118: mod_base = OTHER; note = Phosphorothioate (PS) linkage
  modified_base 118: mod_base = cm
  modified_base 119: mod_base = OTHER; note = Phosphorothioate (PS) linkage
  modified_base 119: mod_base = OTHER; note = 3' inverted deoxythymidine
  source 1..119: mol_type = other RNA

SEQ ID NO: 1189 - RNA, 121 nt, synthetic construct; identical to SEQ ID NO: 1125
  modified_base 1: mod_base = um
  modified_base 2: mod_base = OTHER; note = Phosphorothioate (PS) linkage
  modified_base 2: mod_base = um
  modified_base 3: mod_base = OTHER; note = Phosphorothioate (PS) linkage
  modified_base 3: mod_base = gm
  modified_base 4: mod_base = OTHER; note = Phosphorothioate (PS) linkage
  modified_base 29: mod_base = gm
  modified_base 30: mod_base = cm
  modified_base 31: mod_base = um
  modified_base 32: mod_base = OTHER; note = 2'-O-methyladenosine
  modified_base 33: mod_base = gm
  modified_base 34: mod_base = OTHER; note = 2'-O-methyladenosine
  modified_base 35: mod_base = OTHER; note = 2'-O-methyladenosine
  modified_base 36: mod_base = OTHER; note = 2'-O-methyladenosine
  modified_base 37: mod_base = um
  modified_base 38: mod_base = OTHER; note = 2'-O-methyladenosine
  modified_base 39: mod_base = gm
  modified_base 40: mod_base = cm
  modified_base 68: mod_base = OTHER; note = 2'-O-methyladenosine
  modified_base 69: mod_base = OTHER; note = 2'-O-methyladenosine
  modified_base 70: mod_base = cm
  modified_base 71: mod_base = um
  modified_base 72: mod_base = um
  modified_base 73: mod_base = gm
  modified_base 74: mod_base = OTHER; note = 2'-O-methyladenosine
  modified_base 75: mod_base = OTHER; note = 2'-O-methyladenosine
  modified_base 76: mod_base = OTHER; note = 2'-O-methyladenosine
  modified_base 77: mod_base = OTHER; note = 2'-O-methyladenosine
  modified_base 78: mod_base = OTHER; note = 2'-O-methyladenosine
  modified_base 79: mod_base = gm
  modified_base 80: mod_base = um
  modified_base 81: mod_base = gm
  modified_base 82: mod_base = gm
  modified_base 83: mod_base = cm
  modified_base 84: mod_base = OTHER; note = 2'-O-methyladenosine
  modified_base 85: mod_base = cm
  modified_base 86: mod_base = cm
  modified_base 87: mod_base = gm
  modified_base 88: mod_base = OTHER; note = 2'-O-methyladenosine
  modified_base 89: mod_base = gm
  modified_base 90: mod_base = um
  modified_base 91: mod_base = cm
  modified_base 92: mod_base = gm
  modified_base 93: mod_base = gm
  modified_base 94: mod_base = um
  modified_base 95: mod_base = gm
  modified_base 96: mod_base = cm
  modified_base 111: mod_base = OTHER; note = 2' fluoro modified base
  modified_base 116: mod_base = OTHER; note = 2' fluoro modified base
  modified_base 118: mod_base = cm
  modified_base 119: mod_base = OTHER; note = Phosphorothioate (PS) linkage
  modified_base 119: mod_base = um
  modified_base 120: mod_base = OTHER; note = Phosphorothioate (PS) linkage
  modified_base 120: mod_base = um
  modified_base 121: mod_base = OTHER; note = Phosphorothioate (PS) linkage
  modified_base 121: mod_base = um
  source 1..121: mol_type = other RNA

SEQ ID NO: 1190 - RNA, 120 nt, synthetic construct; identical to SEQ ID NO: 1185
  modified_base 1: mod_base = um
  modified_base 2: mod_base = OTHER; note = Phosphorothioate (PS) linkage
  modified_base 2: mod_base = um
  modified_base 3: mod_base = OTHER; note = Phosphorothioate (PS) linkage
  modified_base 3: mod_base = gm
  modified_base 4: mod_base = OTHER; note = Phosphorothioate (PS) linkage
  modified_base 29: mod_base = gm
  modified_base 30: mod_base = cm
  modified_base 31: mod_base = um
  modified_base 32: mod_base = OTHER; note = 2'-O-methyladenosine
  modified_base 33: mod_base = gm
  modified_base 34: mod_base = OTHER; note = 2'-O-methyladenosine
  modified_base 35: mod_base = OTHER; note = 2'-O-methyladenosine
  modified_base 36: mod_base = OTHER; note = 2'-O-methyladenosine
  modified_base 37: mod_base = um
  modified_base 38: mod_base = OTHER; note = 2'-O-methyladenosine
  modified_base 39: mod_base = gm
  modified_base 40: mod_base = cm
  modified_base 68: mod_base = OTHER; note = 2'-O-methyladenosine
  modified_base 69: mod_base = OTHER; note = 2'-O-methyladenosine
  modified_base 70: mod_base = cm
  modified_base 71: mod_base = um
  modified_base 72: mod_base = um
  modified_base 73: mod_base = gm
  modified_base 74: mod_base = OTHER; note = 2'-O-methyladenosine
  modified_base 75: mod_base = OTHER; note = 2'-O-methyladenosine
  modified_base 76: mod_base = OTHER; note = 2'-O-methyladenosine
  modified_base 77: mod_base = OTHER; note = 2'-O-methyladenosine
  modified_base 78: mod_base = OTHER; note = 2'-O-methyladenosine
  modified_base 79: mod_base = gm
  modified_base 80: mod_base = um
  modified_base 81: mod_base = gm
  modified_base 82: mod_base = gm
  modified_base 83: mod_base = cm
  modified_base 84: mod_base = OTHER; note = 2'-O-methyladenosine
  modified_base 85: mod_base = cm
  modified_base 86: mod_base = cm
  modified_base 87: mod_base = gm
  modified_base 88: mod_base = OTHER; note = 2'-O-methyladenosine
  modified_base 89: mod_base = gm
  modified_base 90: mod_base = um
  modified_base 91: mod_base = cm
  modified_base 92: mod_base = gm
  modified_base 93: mod_base = gm
  modified_base 94: mod_base = um
  modified_base 95: mod_base = gm
  modified_base 96: mod_base = cm
  modified_base 111: mod_base = OTHER; note = 2' fluoro modified base
  modified_base 116: mod_base = OTHER; note = 2' fluoro modified base
  modified_base 117: mod_base = gm
  modified_base 118: mod_base = OTHER; note = Phosphorothioate (PS) linkage
  modified_base 118: mod_base = cm
  modified_base 119: mod_base = OTHER; note = Phosphorothioate (PS) linkage
  modified_base 119: mod_base = um
  modified_base 120: mod_base = OTHER; note = Phosphorothioate (PS) linkage
  modified_base 120: mod_base = um
  source 1..120: mol_type = other RNA

SEQ ID NO: 1191 - RNA, 119 nt, synthetic construct; identical to SEQ ID NO: 1182
  modified_base 1: mod_base = um
  modified_base 2: mod_base = OTHER; note = Phosphorothioate (PS) linkage
  modified_base 2: mod_base = um
  modified_base 3: mod_base = OTHER; note = Phosphorothioate (PS) linkage
  modified_base 3: mod_base = gm
  modified_base 4: mod_base = OTHER; note = Phosphorothioate (PS) linkage
  modified_base 29: mod_base = gm
  modified_base 30: mod_base = cm
  modified_base 31: mod_base = um
  modified_base 32: mod_base = OTHER; note = 2'-O-methyladenosine
  modified_base 33: mod_base = gm
  modified_base 34: mod_base = OTHER; note = 2'-O-methyladenosine
  modified_base 35: mod_base = OTHER; note = 2'-O-methyladenosine
  modified_base 36: mod_base = OTHER; note = 2'-O-methyladenosine
  modified_base 37: mod_base = um
  modified_base 38: mod_base = OTHER; note = 2'-O-methyladenosine
  modified_base 39: mod_base = gm
  modified_base 40: mod_base = cm
  modified_base 68: mod_base = OTHER; note = 2'-O-methyladenosine
  modified_base 69: mod_base = OTHER; note = 2'-O-methyladenosine
  modified_base 70: mod_base = cm
  modified_base 71: mod_base = um
  modified_base 72: mod_base = um
  modified_base 73: mod_base = gm
  modified_base 74: mod_base = OTHER; note = 2'-O-methyladenosine
  modified_base 75: mod_base = OTHER; note = 2'-O-methyladenosine
  modified_base 76: mod_base = OTHER; note = 2'-O-methyladenosine
  modified_base 77: mod_base = OTHER; note = 2'-O-methyladenosine
  modified_base 78: mod_base = OTHER; note = 2'-O-methyladenosine
  modified_base 79: mod_base = gm
  modified_base 80: mod_base = um
  modified_base 81: mod_base = gm
  modified_base 82: mod_base = gm
  modified_base 83: mod_base = cm
  modified_base 84: mod_base = OTHER; note = 2'-O-methyladenosine
  modified_base 85: mod_base = cm
  modified_base 86: mod_base = cm
  modified_base 87: mod_base = gm
  modified_base 88: mod_base = OTHER; note = 2'-O-methyladenosine
  modified_base 89: mod_base = gm
  modified_base 90: mod_base = um
  modified_base 91: mod_base = cm
  modified_base 92: mod_base = gm
  modified_base 93: mod_base = gm
  modified_base 94: mod_base = um
  modified_base 95: mod_base = gm
  modified_base 96: mod_base = cm
  modified_base 111: mod_base = OTHER; note = 2' fluoro modified base
  modified_base 116: mod_base = OTHER; note = 2' fluoro modified base
  modified_base 117: mod_base = OTHER; note = Phosphorothioate (PS) linkage
  modified_base 117: mod_base = gm
  modified_base 118: mod_base = OTHER; note = Phosphorothioate (PS) linkage
  modified_base 118: mod_base = cm
  modified_base 119: mod_base = OTHER; note = Phosphorothioate (PS) linkage
  modified_base 119: mod_base = um
  source 1..119: mol_type = other RNA

SEQ ID NO: 1192 - RNA, 118 nt, synthetic construct
  modified_base 1: mod_base = um
  modified_base 2: mod_base = OTHER; note = Phosphorothioate (PS) linkage
  modified_base 2: mod_base = um
  modified_base 3: mod_base = OTHER; note = Phosphorothioate (PS) linkage
  modified_base 3: mod_base = gm
  modified_base 4: mod_base = OTHER; note = Phosphorothioate (PS) linkage
  modified_base 29: mod_base = gm
  modified_base 30: mod_base = cm
  modified_base 31: mod_base = um
  modified_base 32: mod_base = OTHER; note = 2'-O-methyladenosine
  modified_base 33: mod_base = gm
  modified_base 34: mod_base = OTHER; note = 2'-O-methyladenosine
  modified_base 35: mod_base = OTHER; note = 2'-O-methyladenosine
  modified_base 36: mod_base = OTHER; note = 2'-O-methyladenosine
  modified_base 37: mod_base = um
  modified_base 38: mod_base = OTHER; note = 2'-O-methyladenosine
  modified_base 39: mod_base = gm
  modified_base 40: mod_base = cm
  modified_base 68: mod_base = OTHER; note = 2'-O-methyladenosine
  modified_base 69: mod_base = OTHER; note = 2'-O-methyladenosine
  modified_base 70: mod_base = cm
  modified_base 71: mod_base = um
  modified_base 72: mod_base = um
  modified_base 73: mod_base = gm
  modified_base 74: mod_base = OTHER; note = 2'-O-methyladenosine
  modified_base 75: mod_base = OTHER; note = 2'-O-methyladenosine
  modified_base 76: mod_base = OTHER; note = 2'-O-methyladenosine
  modified_base 77: mod_base = OTHER; note = 2'-O-methyladenosine
  modified_base 78: mod_base = OTHER; note = 2'-O-methyladenosine
  modified_base 79: mod_base = gm
  modified_base 80: mod_base = um
  modified_base 81: mod_base = gm
  modified_base 82: mod_base = gm
  modified_base 83: mod_base = cm
  modified_base 84: mod_base = OTHER; note = 2'-O-methyladenosine
  modified_base 85: mod_base = cm
  modified_base 86: mod_base = cm
  modified_base 87: mod_base = gm
  modified_base 88: mod_base = OTHER; note = 2'-O-methyladenosine
  modified_base 89: mod_base = gm
  modified_base 90: mod_base = um
  modified_base 91: mod_base = cm
  modified_base 92: mod_base = gm
  modified_base 93: mod_base = gm
  modified_base 94: mod_base = um
  modified_base 95: mod_base = gm
  modified_base 96: mod_base = cm
  modified_base 111: mod_base = OTHER; note = 2' fluoro modified base
  modified_base 115: mod_base = um
  modified_base 116: mod_base = OTHER; note = Phosphorothioate (PS) linkage
  modified_base 116: mod_base = OTHER; note = 2' fluoro modified base
  modified_base 117: mod_base = OTHER; note = Phosphorothioate (PS) linkage
  modified_base 117: mod_base = gm
  modified_base 118: mod_base = OTHER; note = Phosphorothioate (PS) linkage
  modified_base 118: mod_base = cm
  source 1..118: mol_type = other RNA
ttggtgactgccacgcccaagttttagagctagaaatagcaagttaaaataaggctagtccgttatcaacttgaaaaagtggcaccgagtcggtgcgtgaacaccccttgggcgtggc

SEQ ID NO: 1193 - RNA, 122 nt, synthetic construct; identical to SEQ ID NO: 37
  modified_base 1: mod_base = um
  modified_base 2: mod_base = OTHER; note = Phosphorothioate (PS) linkage
  modified_base 2: mod_base = um
  modified_base 3: mod_base = OTHER; note = Phosphorothioate (PS) linkage
  modified_base 3: mod_base = gm
  modified_base 4: mod_base = OTHER; note = Phosphorothioate (PS) linkage
  modified_base 29: mod_base = gm
  modified_base 30: mod_base = cm
  modified_base 31: mod_base = um
  modified_base 32: mod_base = OTHER; note = 2'-O-methyladenosine
  modified_base 33: mod_base = gm
  modified_base 34: mod_base = OTHER; note = 2'-O-methyladenosine
  modified_base 35: mod_base = OTHER; note = 2'-O-methyladenosine
  modified_base 36: mod_base = OTHER; note = 2'-O-methyladenosine
  modified_base 37: mod_base = um
  modified_base 38: mod_base = OTHER; note = 2'-O-methyladenosine
  modified_base 39: mod_base = gm
  modified_base 40: mod_base = cm
  modified_base 68: mod_base = OTHER; note = 2'-O-methyladenosine
  modified_base 69: mod_base = OTHER; note = 2'-O-methyladenosine
  modified_base 70: mod_base = cm
  modified_base 71: mod_base = um
  modified_base 72: mod_base = um
  modified_base 73: mod_base = gm
  modified_base 74: mod_base = OTHER; note = 2'-O-methyladenosine
  modified_base 75: mod_base = OTHER; note = 2'-O-methyladenosine
  modified_base 76: mod_base = OTHER; note = 2'-O-methyladenosine
  modified_base 77: mod_base = OTHER; note = 2'-O-methyladenosine
  modified_base 78: mod_base = OTHER; note = 2'-O-methyladenosine
  modified_base 79: mod_base = gm
  modified_base 80: mod_base = um
  modified_base 81: mod_base = gm
  modified_base 82: mod_base = gm
  modified_base 83: mod_base = cm
  modified_base 84: mod_base = OTHER; note = 2'-O-methyladenosine
  modified_base 85: mod_base = cm
  modified_base 86: mod_base = cm
  modified_base 87: mod_base = gm
  modified_base 88: mod_base = OTHER; note = 2'-O-methyladenosine
  modified_base 89: mod_base = gm
  modified_base 90: mod_base = um
  modified_base 91: mod_base = cm
  modified_base 92: mod_base = gm
  modified_base 93: mod_base = gm
  modified_base 94: mod_base = um
  modified_base 95: mod_base = gm
  modified_base 96: mod_base = cm
  modified_base 115: mod_base = OTHER; note = 2' fluoro modified base
  modified_base 116: mod_base = gm
  modified_base 117: mod_base = gm
  modified_base 118: mod_base = cm
  modified_base 119: mod_base = um
  modified_base 120: mod_base = OTHER; note = Phosphorothioate (PS) linkage
  modified_base 120: mod_base = um
  modified_base 121: mod_base = OTHER; note = Phosphorothioate (PS) linkage
  modified_base 121: mod_base = um
  modified_base 122: mod_base = OTHER; note = Phosphorothioate (PS) linkage
  modified_base 122: mod_base = um
  source 1..122: mol_type = other RNA

SEQ ID NO: 1194 - RNA, 122 nt, synthetic construct; identical to SEQ ID NO: 37
  modified_base 1: mod_base = um
  modified_base 2: mod_base = OTHER; note = Phosphorothioate (PS) linkage
  modified_base 2: mod_base = um
  modified_base 3: mod_base = OTHER; note = Phosphorothioate (PS) linkage
  modified_base 3: mod_base = gm
  modified_base 4: mod_base = OTHER; note = Phosphorothioate (PS) linkage
  modified_base 29: mod_base = gm
  modified_base 30: mod_base = cm
  modified_base 31: mod_base = um
  modified_base 32: mod_base = OTHER; note = 2'-O-methyladenosine
  modified_base 33: mod_base = gm
  modified_base 34: mod_base = OTHER; note = 2'-O-methyladenosine
  modified_base 35: mod_base = OTHER; note = 2'-O-methyladenosine
  modified_base 36: mod_base = OTHER; note = 2'-O-methyladenosine
  modified_base 37: mod_base = um
  modified_base 38: mod_base = OTHER; note = 2'-O-methyladenosine
  modified_base 39: mod_base = gm
  modified_base 40: mod_base = cm
  modified_base 68: mod_base = OTHER; note = 2'-O-methyladenosine
  modified_base 69: mod_base = OTHER; note = 2'-O-methyladenosine
  modified_base 70: mod_base = cm
  modified_base 71: mod_base = um
  modified_base 72: mod_base = um
  modified_base 73: mod_base = gm
  modified_base 74: mod_base = OTHER; note = 2'-O-methyladenosine
  modified_base 75: mod_base = OTHER; note = 2'-O-methyladenosine
  modified_base 76: mod_base = OTHER; note = 2'-O-methyladenosine
  modified_base 77: mod_base = OTHER; note = 2'-O-methyladenosine
  modified_base 78: mod_base = OTHER; note = 2'-O-methyladenosine
  modified_base 79: mod_base = gm
  modified_base 80: mod_base = um
  modified_base 81: mod_base = gm
  modified_base 82: mod_base = gm
  modified_base 83: mod_base = cm
  modified_base 84: mod_base = OTHER; note = 2'-O-methyladenosine
  modified_base 85: mod_base = cm
  modified_base 86: mod_base = cm
  modified_base 87: mod_base = gm
  modified_base 88: mod_base = OTHER; note = 2'-O-methyladenosine
  modified_base 89: mod_base = gm
  modified_base 90: mod_base = um
  modified_base 91: mod_base = cm
  modified_base 92: mod_base = gm
  modified_base 93: mod_base = gm
  modified_base 94: mod_base = um
  modified_base 95: mod_base = gm
  modified_base 96: mod_base = cm
  modified_base 114: mod_base = gm
  modified_base 115: mod_base = OTHER; note = 2' fluoro modified base
  modified_base 116: mod_base = gm
  modified_base 117: mod_base = gm
  modified_base 118: mod_base = cm
  modified_base 119: mod_base = um
  modified_base 120: mod_base = OTHER; note = Phosphorothioate (PS) linkage
  modified_base 120: mod_base = um
  modified_base 121: mod_base = OTHER; note = Phosphorothioate (PS) linkage
  modified_base 121: mod_base = um
  modified_base 122: mod_base = OTHER; note = Phosphorothioate (PS) linkage
  modified_base 122: mod_base = um
  source 1..122: mol_type = other RNA

SEQ ID NO: 1195 - RNA, 122 nt, synthetic construct; identical to SEQ ID NO: 37
  modified_base 1: mod_base = um
  modified_base 2: mod_base = OTHER; note = Phosphorothioate (PS) linkage
  modified_base 2: mod_base = um
  modified_base 3: mod_base = OTHER; note = Phosphorothioate (PS) linkage
  modified_base 3: mod_base = gm
  modified_base 4: mod_base = OTHER; note = Phosphorothioate (PS) linkage
  modified_base 29: mod_base = gm
  modified_base 30: mod_base = cm
  modified_base 31: mod_base = um
  modified_base 32: mod_base = OTHER; note = 2'-O-methyladenosine
  modified_base 33: mod_base = gm
  modified_base 34: mod_base = OTHER; note = 2'-O-methyladenosine
  modified_base 35: mod_base = OTHER; note = 2'-O-methyladenosine
  modified_base 36: mod_base = OTHER; note = 2'-O-methyladenosine
  modified_base 37: mod_base = um
  modified_base 38: mod_base = OTHER; note = 2'-O-methyladenosine
  modified_base 39: mod_base = gm
  modified_base 40: mod_base = cm
  modified_base 68: mod_base = OTHER; note = 2'-O-methyladenosine
  modified_base 69: mod_base = OTHER; note = 2'-O-methyladenosine
  modified_base 70: mod_base = cm
  modified_base 71: mod_base = um
  modified_base 72: mod_base = um
  modified_base 73: mod_base = gm
  modified_base 74: mod_base = OTHER; note = 2'-O-methyladenosine
  modified_base 75: mod_base = OTHER; note = 2'-O-methyladenosine
  modified_base 76: mod_base = OTHER; note = 2'-O-methyladenosine
  modified_base 77: mod_base = OTHER; note = 2'-O-methyladenosine
  modified_base 78: mod_base = OTHER; note = 2'-O-methyladenosine
  modified_base 79: mod_base = gm
  modified_base 80: mod_base = um
  modified_base 81: mod_base = gm
  modified_base 82: mod_base = gm
  modified_base 83: mod_base = cm
  modified_base 84: mod_base = OTHER; note = 2'-O-methyladenosine
  modified_base 85: mod_base = cm
  modified_base 86: mod_base = cm
  modified_base 87: mod_base = gm
  modified_base 88: mod_base = OTHER; note = 2'-O-methyladenosine
  modified_base 89: mod_base = gm
  modified_base 90: mod_base = um
  modified_base 91: mod_base = cm
  modified_base 92: mod_base = gm
  modified_base 93: mod_base = gm
  modified_base 94: mod_base = um
  modified_base 95: mod_base = gm
  modified_base 96: mod_base = cm
  modified_base 113: mod_base = cm
  modified_base 115: mod_base = OTHER; note = 2' fluoro modified base
  modified_base 119: mod_base = um
  modified_base 120: mod_base = OTHER; note = Phosphorothioate (PS) linkage
  modified_base 120: mod_base = um
  modified_base 121: mod_base = OTHER; note = Phosphorothioate (PS) linkage
  modified_base 121: mod_base = um
  modified_base 122: mod_base = OTHER; note = Phosphorothioate (PS) linkage
  modified_base 122: mod_base = um
  source 1..122: mol_type = other RNA

SEQ ID NO: 1196 - RNA, 122 nt, synthetic construct; identical to SEQ ID NO: 37
  modified_base 1: mod_base = um
  modified_base 2: mod_base = OTHER; note = Phosphorothioate (PS) linkage
  modified_base 2: mod_base = um
  modified_base 3: mod_base = OTHER; note = Phosphorothioate (PS) linkage
  modified_base 3: mod_base = gm
  modified_base 4: mod_base = OTHER; note = Phosphorothioate (PS) linkage
  modified_base 29: mod_base = gm
  modified_base 30: mod_base = cm
  modified_base 31: mod_base = um
  modified_base 32: mod_base = OTHER; note = 2'-O-methyladenosine
  modified_base 33: mod_base = gm
  modified_base 34: mod_base = OTHER; note = 2'-O-methyladenosine
  modified_base 35: mod_base = OTHER; note = 2'-O-methyladenosine
  modified_base 36: mod_base = OTHER; note = 2'-O-methyladenosine
  modified_base 37: mod_base = um
  modified_base 38: mod_base = OTHER; note = 2'-O-methyladenosine
  modified_base 39: mod_base = gm
  modified_base 40: mod_base = cm
  modified_base 68: mod_base = OTHER; note = 2'-O-methyladenosine
  modified_base 69: mod_base = OTHER; note = 2'-O-methyladenosine
  modified_base 70: mod_base = cm
  modified_base 71: mod_base = um
  modified_base 72: mod_base = um
  modified_base 73: mod_base = gm
  modified_base 74: mod_base = OTHER; note = 2'-O-methyladenosine
  modified_base 75: mod_base = OTHER; note = 2'-O-methyladenosine
  modified_base 76: mod_base = OTHER; note = 2'-O-methyladenosine
  modified_base 77: mod_base = OTHER; note = 2'-O-methyladenosine
  modified_base 78: mod_base = OTHER; note = 2'-O-methyladenosine
  modified_base 79: mod_base = gm
  modified_base 80: mod_base = um
  modified_base 81: mod_base = gm
  modified_base 82: mod_base = gm
  modified_base 83: mod_base = cm
  modified_base 84: mod_base = OTHER; note = 2'-O-methyladenosine
  modified_base 85: mod_base = cm
  modified_base 86: mod_base = cm
  modified_base 87: mod_base = gm
  modified_base 88: mod_base = OTHER; note = 2'-O-methyladenosine
  modified_base 89: mod_base = gm
  modified_base 90: mod_base = um
  modified_base 91: mod_base = cm
  modified_base 92: mod_base = gm
  modified_base 93: mod_base = gm
  modified_base 94: mod_base = um
  modified_base 95: mod_base = gm
  modified_base 96: mod_base = cm
  modified_base 112: mod_base = gm
  modified_base 115: mod_base = OTHER; note = 2' fluoro modified base
  modified_base 119: mod_base = um
  modified_base 120: mod_base = OTHER; note = Phosphorothioate (PS) linkage
  modified_base 120: mod_base = um
  modified_base 121: mod_base = OTHER; note = Phosphorothioate (PS) linkage
  modified_base 121: mod_base = um
  modified_base 122: mod_base = OTHER; note = Phosphorothioate (PS) linkage
  modified_base 122: mod_base = um
  source 1..122: mol_type = other RNA

SEQ ID NO: 1197 - RNA, 122 nt, synthetic construct; identical to SEQ ID NO: 37
  modified_base 1: mod_base = um
  modified_base 2: mod_base = OTHER; note = Phosphorothioate (PS) linkage
  modified_base 2: mod_base = um
  modified_base 3: mod_base = OTHER; note = Phosphorothioate (PS) linkage
  modified_base 3: mod_base = gm
  modified_base 4: mod_base = OTHER; note = Phosphorothioate (PS) linkage
  modified_base 29: mod_base = gm
  modified_base 30: mod_base = cm
  modified_base 31: mod_base = um
  modified_base 32: mod_base = OTHER; note = 2'-O-methyladenosine
  modified_base 33: mod_base = gm
  modified_base 34: mod_base = OTHER; note = 2'-O-methyladenosine
  modified_base 35: mod_base = OTHER; note = 2'-O-methyladenosine
  modified_base 36: mod_base = OTHER; note = 2'-O-methyladenosine
  modified_base 37: mod_base = um
  modified_base 38: mod_base = OTHER; note = 2'-O-methyladenosine
  modified_base 39: mod_base = gm
  modified_base 40: mod_base = cm
  modified_base 68: mod_base = OTHER; note = 2'-O-methyladenosine
  modified_base 69: mod_base = OTHER; note = 2'-O-methyladenosine
  modified_base 70: mod_base = cm
  modified_base 71: mod_base = um
  modified_base 72: mod_base = um
  modified_base 73: mod_base = gm
  modified_base 74: mod_base = OTHER; note = 2'-O-methyladenosine
  modified_base 75: mod_base = OTHER; note = 2'-O-methyladenosine
  modified_base 76: mod_base = OTHER; note = 2'-O-methyladenosine
  modified_base 77: mod_base = OTHER; note = 2'-O-methyladenosine
  modified_base 78: mod_base = OTHER; note = 2'-O-methyladenosine
  modified_base 79: mod_base = gm
  modified_base 80: mod_base = um
  modified_base 81: mod_base = gm
  modified_base 82: mod_base = gm
  modified_base 83: mod_base = cm
  modified_base 84: mod_base = OTHER; note = 2'-O-methyladenosine
  modified_base 85: mod_base = cm
  modified_base 86: mod_base = cm
  modified_base 87: mod_base = gm
  modified_base 88: mod_base = OTHER; note = 2'-O-methyladenosine
  modified_base 89: mod_base = gm
  modified_base 90: mod_base = um
  modified_base 91: mod_base = cm
  modified_base 92: mod_base = gm
  modified_base 93: mod_base = gm
  modified_base 94: mod_base = um
  modified_base 95: mod_base = gm
  modified_base 96: mod_base = cm
  modified_base 111: mod_base = gm
  modified_base 115: mod_base = OTHER; note = 2' fluoro modified base
  modified_base 119: mod_base = um
  modified_base 120: mod_base = OTHER; note = Phosphorothioate (PS) linkage
  modified_base 120: mod_base = um
  modified_base 121: mod_base = OTHER; note = Phosphorothioate (PS) linkage
  modified_base 121: mod_base = um
  modified_base 122: mod_base = OTHER; note = Phosphorothioate (PS) linkage
  modified_base 122: mod_base = um
  source 1..122: mol_type = other RNA

SEQ ID NO: 1198 - RNA, 122 nt, synthetic construct; identical to SEQ ID NO: 37
  modified_base 1: mod_base = um
  modified_base 2: mod_base = OTHER; note = Phosphorothioate (PS) linkage
  modified_base 2: mod_base = um
  modified_base 3: mod_base = OTHER; note = Phosphorothioate (PS) linkage
  modified_base 3: mod_base = gm
  modified_base 4: mod_base = OTHER; note = Phosphorothioate (PS) linkage
  modified_base 29: mod_base = gm
  modified_base 30: mod_base = cm
  modified_base 31: mod_base = um
  modified_base 32: mod_base = OTHER; note = 2'-O-methyladenosine
  modified_base 33: mod_base = gm
  modified_base 34: mod_base = OTHER; note = 2'-O-methyladenosine
  modified_base 35: mod_base = OTHER; note = 2'-O-methyladenosine
  modified_base 36: mod_base = OTHER; note = 2'-O-methyladenosine
  modified_base 37: mod_base = um
  modified_base 38: mod_base = OTHER; note = 2'-O-methyladenosine
  modified_base 39: mod_base = gm
  modified_base 40: mod_base = cm
  modified_base 68: mod_base = OTHER; note = 2'-O-methyladenosine
  modified_base 69: mod_base = OTHER; note = 2'-O-methyladenosine
  modified_base 70: mod_base = cm
  modified_base 71: mod_base = um
  modified_base 72: mod_base = um
  modified_base 73: mod_base = gm
  modified_base 74: mod_base = OTHER; note = 2'-O-methyladenosine
  modified_base 75: mod_base = OTHER; note = 2'-O-methyladenosine
  modified_base 76: mod_base = OTHER; note = 2'-O-methyladenosine
  modified_base 77: mod_base = OTHER; note = 2'-O-methyladenosine
  modified_base 78: mod_base = OTHER; note = 2'-O-methyladenosine
  modified_base 79: mod_base = gm
  modified_base 80: mod_base = um
  modified_base 81: mod_base = gm
  modified_base 82: mod_base = gm
  modified_base 83: mod_base = cm
  modified_base 84: mod_base = OTHER; note = 2'-O-methyladenosine
  modified_base 85: mod_base = cm
  modified_base 86: mod_base = cm
  modified_base 87: mod_base = gm
  modified_base 88: mod_base = OTHER; note = 2'-O-methyladenosine
  modified_base 89: mod_base = gm
  modified_base 90: mod_base = um
  modified_base 91: mod_base = cm
  modified_base 92: mod_base = gm
  modified_base 93: mod_base = gm
  modified_base 94: mod_base = um
  modified_base 95: mod_base = gm
  modified_base 96: mod_base = cm
  modified_base 111: mod_base = OTHER; note = 2' fluoro modified base
  modified_base 112: mod_base = OTHER; note = 2' fluoro modified base
  modified_base 115: mod_base = um
  modified_base 116: mod_base = gm
  modified_base 117: mod_base = gm
  modified_base 118: mod_base = cm
  modified_base 119: mod_base = um
  modified_base 120: mod_base = OTHER; note = Phosphorothioate (PS) linkage
  modified_base 120: mod_base = um
  modified_base 121: mod_base = OTHER; note = Phosphorothioate (PS) linkage
  modified_base 121: mod_base = um
  modified_base 122: mod_base = OTHER; note = Phosphorothioate (PS) linkage
  modified_base 122: mod_base = um
  source 1..122: mol_type = other RNA

SEQ ID NO: 1199 - RNA, 122 nt, synthetic construct; identical to SEQ ID NO: 37
  modified_base 1: mod_base = um
  modified_base 2: mod_base = OTHER; note = Phosphorothioate (PS) linkage
  modified_base 2: mod_base = um
  modified_base 3: mod_base = OTHER; note = Phosphorothioate (PS) linkage
  modified_base 3: mod_base = gm
  modified_base 4: mod_base = OTHER; note = Phosphorothioate (PS) linkage
  modified_base 29: mod_base = gm
  modified_base 30: mod_base = cm
  modified_base 31: mod_base = um
  modified_base 32: mod_base = OTHER; note = 2'-O-methyladenosine
  modified_base 33: mod_base = gm
  modified_base 34: mod_base = OTHER; note = 2'-O-methyladenosine
  modified_base 35: mod_base = OTHER; note = 2'-O-methyladenosine
  modified_base 36: mod_base = OTHER; note = 2'-O-methyladenosine
  modified_base 37: mod_base = um
  modified_base 38: mod_base = OTHER; note = 2'-O-methyladenosine
  modified_base 39: mod_base = gm
  modified_base 40: mod_base = cm
  modified_base 68: mod_base = OTHER; note = 2'-O-methyladenosine
  modified_base 69: mod_base = OTHER; note = 2'-O-methyladenosine
  modified_base 70: mod_base = cm
  modified_base 71: mod_base = um
  modified_base 72: mod_base = um
  modified_base 73: mod_base = gm
  modified_base 74: mod_base = OTHER; note = 2'-O-methyladenosine
  modified_base 75: mod_base = OTHER; note = 2'-O-methyladenosine
  modified_base 76: mod_base = OTHER; note = 2'-O-methyladenosine
  modified_base 77: mod_base = OTHER; note = 2'-O-methyladenosine
  modified_base 78: mod_base = OTHER; note = 2'-O-methyladenosine
  modified_base 79: mod_base = gm
  modified_base 80: mod_base = um
  modified_base 81: mod_base = gm
  modified_base 82: mod_base = gm
  modified_base 83: mod_base = cm
  modified_base 84: mod_base = OTHER; note = 2'-O-methyladenosine
  modified_base 85: mod_base = cm
  modified_base 86: mod_base = cm
  modified_base 87: mod_base = gm
  modified_base 88: mod_base = OTHER; note = 2'-O-methyladenosine
  modified_base 89: mod_base = gm
  modified_base 90: mod_base = um
  modified_base 91: mod_base = cm
  modified_base 92: mod_base = gm
  modified_base 93: mod_base = gm
  modified_base 94: mod_base = um
  modified_base 95: mod_base = gm
  modified_base 96: mod_base = cm
  modified_base 111: mod_base = OTHER; note = 2' fluoro modified base
  modified_base 112: mod_base = OTHER; note = 2' fluoro modified base
  modified_base 115: mod_base = um
  modified_base 117: mod_base = gm
  modified_base 118: mod_base = cm
  modified_base 119: mod_base = um
  modified_base 120: mod_base = OTHER; note = Phosphorothioate (PS) linkage
  modified_base 120: mod_base = um
  modified_base 121: mod_base = OTHER; note = Phosphorothioate (PS) linkage
  modified_base 121: mod_base = um
  modified_base 122: mod_base = OTHER; note = Phosphorothioate (PS) linkage
  modified_base 122: mod_base = um
  source 1..122: mol_type = other RNA

SEQ ID NO: 1200 - RNA, 122 nt, synthetic construct; identical to SEQ ID NO: 37
  modified_base 1: mod_base = um
  modified_base 2: mod_base = OTHER; note = Phosphorothioate (PS) linkage
  modified_base 2: mod_base = um
  modified_base 3: mod_base = OTHER; note = Phosphorothioate (PS) linkage
  modified_base 3: mod_base = gm
  modified_base 4: mod_base = OTHER; note = Phosphorothioate (PS) linkage
  modified_base 29: mod_base = gm
  modified_base 30: mod_base = cm
  modified_base 31: mod_base = um
  modified_base 32: mod_base = OTHER; note = 2'-O-methyladenosine
  modified_base 33: mod_base = gm
  modified_base 34: mod_base = OTHER; note = 2'-O-methyladenosine
  modified_base 35: mod_base = OTHER; note = 2'-O-methyladenosine
  modified_base 36: mod_base = OTHER; note = 2'-O-methyladenosine
  modified_base 37: mod_base = um
  modified_base 38: mod_base = OTHER; note = 2'-O-methyladenosine
  modified_base 39: mod_base = gm
  modified_base 40: mod_base = cm
  modified_base 68: mod_base = OTHER; note = 2'-O-methyladenosine
  modified_base 69: mod_base = OTHER; note = 2'-O-methyladenosine
  modified_base 70: mod_base = cm
  modified_base 71: mod_base = um
  modified_base 72: mod_base = um
  modified_base 73: mod_base = gm
  modified_base 74: mod_base = OTHER; note = 2'-O-methyladenosine
  modified_base 75: mod_base = OTHER; note = 2'-O-methyladenosine
  modified_base 76: mod_base = OTHER; note = 2'-O-methyladenosine
  modified_base 77: mod_base = OTHER; note = 2'-O-methyladenosine
  modified_base 78: mod_base = OTHER; note = 2'-O-methyladenosine
  modified_base 79: mod_base = gm
  modified_base 80: mod_base = um
  modified_base 81: mod_base = gm
  modified_base 82: mod_base = gm
  modified_base 83: mod_base = cm
  modified_base 84: mod_base = OTHER; note = 2'-O-methyladenosine
  modified_base 85: mod_base = cm
  modified_base 86: mod_base = cm
  modified_base 87: mod_base = gm
  modified_base 88: mod_base = OTHER; note = 2'-O-methyladenosine
  modified_base 89: mod_base = gm
  modified_base 90: mod_base = um
  modified_base 91: mod_base = cm
  modified_base 92: mod_base = gm
  modified_base 93: mod_base = gm
  modified_base 94: mod_base = um
  modified_base 95: mod_base = gm
  modified_base 96: mod_base = cm
  modified_base 111: mod_base = OTHER; note = 2' fluoro modified base
  modified_base 112: mod_base = OTHER; note = 2' fluoro modified base
  modified_base 114: mod_base = gm
  modified_base 115: mod_base = um
  modified_base 116: mod_base = gm
  modified_base 117: mod_base = gm
  modified_base 118: mod_base = cm
  modified_base 119: mod_base = um
  modified_base 120: mod_base = OTHER; note = Phosphorothioate (PS) linkage
  modified_base 120: mod_base = um
  modified_base 121: mod_base = OTHER; note = Phosphorothioate (PS) linkage
  modified_base 121: mod_base = um
  modified_base 122: mod_base = OTHER; note = Phosphorothioate (PS) linkage
  modified_base 122: mod_base = um
  source 1..122: mol_type = other RNA

SEQ ID NO: 1201 - RNA, 122 nt, synthetic construct; identical to SEQ ID NO: 37
  modified_base 1: mod_base = um
  modified_base 2: mod_base = OTHER; note = Phosphorothioate (PS) linkage
  modified_base 2: mod_base = um
  modified_base 3: mod_base = OTHER; note = Phosphorothioate (PS) linkage
  modified_base 3: mod_base = gm
  modified_base 4: mod_base = OTHER; note = Phosphorothioate (PS) linkage
  modified_base 29: mod_base = gm
  modified_base 30: mod_base = cm
  modified_base 31: mod_base = um
  modified_base 32: mod_base = OTHER; note = 2'-O-methyladenosine
  modified_base 33: mod_base = gm
  modified_base 34: mod_base = OTHER; note = 2'-O-methyladenosine
  modified_base 35: mod_base = OTHER; note = 2'-O-methyladenosine
  modified_base 36: mod_base = OTHER; note = 2'-O-methyladenosine
  modified_base 37: mod_base = um
  modified_base 38: mod_base = OTHER; note = 2'-O-methyladenosine
  modified_base 39: mod_base = gm
  modified_base 40: mod_base = cm
  modified_base 68: mod_base = OTHER; note = 2'-O-methyladenosine
  modified_base 69: mod_base = OTHER; note = 2'-O-methyladenosine
  modified_base 70: mod_base = cm
  modified_base 71: mod_base = um
  modified_base 72: mod_base = um
  modified_base 73: mod_base = gm
  modified_base 74: mod_base = OTHER; note = 2'-O-methyladenosine
  modified_base 75: mod_base = OTHER; note = 2'-O-methyladenosine
  modified_base 76: mod_base = OTHER; note = 2'-O-methyladenosine
  modified_base 77: mod_base = OTHER; note = 2'-O-methyladenosine
  modified_base 78: mod_base = OTHER; note = 2'-O-methyladenosine
  modified_base 79: mod_base = gm
  modified_base 80: mod_base = um
  modified_base 81: mod_base = gm
  modified_base 82: mod_base = gm
  modified_base 83: mod_base = cm
  modified_base 84: mod_base = OTHER; note = 2'-O-methyladenosine
  modified_base 85: mod_base = cm
  modified_base 86: mod_base = cm
  modified_base 87: mod_base = gm
  modified_base 88: mod_base = OTHER; note = 2'-O-methyladenosine
  modified_base 89: mod_base = gm
  modified_base 90: mod_base = um
  modified_base 91: mod_base = cm
  modified_base 92: mod_base = gm
  modified_base 93: mod_base = gm
  modified_base 94: mod_base = um
  modified_base 95: mod_base = gm
  modified_base 96: mod_base = cm
  modified_base 111: mod_base = OTHER; note = 2' fluoro modified base
  modified_base 112: mod_base = OTHER; note = 2' fluoro modified base
  modified_base 114: mod_base = gm
  modified_base 115: mod_base = um
  modified_base 117: mod_base = gm
  modified_base 118: mod_base = cm
  modified_base 119: mod_base = um
  modified_base 120: mod_base = OTHER; note = Phosphorothioate (PS) linkage
  modified_base 120: mod_base = um
  modified_base 121: mod_base = OTHER; note = Phosphorothioate (PS) linkage
  modified_base 121: mod_base = um
  modified_base 122: mod_base = OTHER; note = Phosphorothioate (PS) linkage
  modified_base 122: mod_base = um
  source 1..122: mol_type = other RNA

SEQ ID NO: 1202 - RNA, 122 nt, synthetic construct; identical to SEQ ID NO: 37
  modified_base 1: mod_base = um
  modified_base 2: mod_base = OTHER; note = Phosphorothioate (PS) linkage
  modified_base 2: mod_base = um
  modified_base 3: mod_base = OTHER; note = Phosphorothioate (PS) linkage
  modified_base 3: mod_base = gm
  modified_base 4: mod_base = OTHER; note = Phosphorothioate (PS) linkage
  modified_base 29: mod_base = gm
  modified_base 30: mod_base = cm
  modified_base 31: mod_base = um
  modified_base 32: mod_base = OTHER; note = 2'-O-methyladenosine
  modified_base 33: mod_base = gm
  modified_base 34: mod_base = OTHER; note = 2'-O-methyladenosine
  modified_base 35: mod_base = OTHER; note = 2'-O-methyladenosine
  modified_base 36: mod_base = OTHER; note = 2'-O-methyladenosine
  modified_base 37: mod_base = um
  modified_base 38: mod_base = OTHER; note = 2'-O-methyladenosine
  modified_base 39: mod_base = gm
  modified_base 40: mod_base = cm
  modified_base 68: mod_base = OTHER; note = 2'-O-methyladenosine
  modified_base 69: mod_base = OTHER; note = 2'-O-methyladenosine
  modified_base 70: mod_base = cm
  modified_base 71: mod_base = um
  modified_base 72: mod_base = um
  modified_base 73: mod_base = gm
  modified_base 74: mod_base = OTHER; note = 2'-O-methyladenosine
  modified_base 75: mod_base = OTHER; note = 2'-O-methyladenosine
  modified_base 76: mod_base = OTHER; note = 2'-O-methyladenosine
  modified_base 77: mod_base = OTHER; note = 2'-O-methyladenosine
  modified_base 78: mod_base = OTHER; note = 2'-O-methyladenosine
  modified_base 79: mod_base = gm
  modified_base 80: mod_base = um
  modified_base 81: mod_base = gm
  modified_base 82: mod_base = gm
  modified_base 83: mod_base = cm
  modified_base 84: mod_base = OTHER; note = 2'-O-methyladenosine
  modified_base 85: mod_base = cm
  modified_base 86: mod_base = cm
  modified_base 87: mod_base = gm
  modified_base 88: mod_base = OTHER; note = 2'-O-methyladenosine
  modified_base 89: mod_base = gm
  modified_base 90: mod_base = um
  modified_base 91: mod_base = cm
  modified_base 92: mod_base = gm
  modified_base 93: mod_base = gm
  modified_base 94: mod_base = um
  modified_base 95: mod_base = gm
  modified_base 96: mod_base = cm
  modified_base 111: mod_base = OTHER; note = 2' fluoro modified base
  modified_base 112: mod_base = OTHER; note = 2' fluoro modified base
  modified_base 113: mod_base = cm
  modified_base 119: mod_base = um
  modified_base 120: mod_base = OTHER; note = Phosphorothioate (PS) linkage
  modified_base 120: mod_base = um
  modified_base 121: mod_base = OTHER; note = Phosphorothioate (PS) linkage
  modified_base 121: mod_base = um
  modified_base 122: mod_base = OTHER; note = Phosphorothioate (PS) linkage
  modified_base 122: mod_base = um
  source 1..122: mol_type = other RNA

SEQ ID NO: 1203 - RNA, 122 nt, synthetic construct; identical to SEQ ID NO: 37
  modified_base 1: mod_base = um
  modified_base 2: mod_base = OTHER; note = Phosphorothioate (PS) linkage
  modified_base 2: mod_base = um
  modified_base 3: mod_base = OTHER; note = Phosphorothioate (PS) linkage
  modified_base 3: mod_base = gm
  modified_base 4: mod_base = OTHER; note = Phosphorothioate (PS) linkage
  modified_base 29: mod_base = gm
  modified_base 30: mod_base = cm
  modified_base 31: mod_base = um
  modified_base 32: mod_base = OTHER; note = 2'-O-methyladenosine
  modified_base 33: mod_base = gm
  modified_base 34: mod_base = OTHER; note = 2'-O-methyladenosine
  modified_base 35: mod_base = OTHER; note = 2'-O-methyladenosine
  modified_base 36: mod_base = OTHER; note = 2'-O-methyladenosine
  modified_base 37: mod_base = um
  modified_base 38: mod_base = OTHER; note = 2'-O-methyladenosine
  modified_base 39: mod_base = gm
  modified_base 40: mod_base = cm
  modified_base 68: mod_base = OTHER; note = 2'-O-methyladenosine
  modified_base 69: mod_base = OTHER; note = 2'-O-methyladenosine
  modified_base 70: mod_base = cm
  modified_base 71: mod_base = um
  modified_base 72: mod_base = um
  modified_base 73: mod_base = gm
  modified_base 74: mod_base = OTHER; note = 2'-O-methyladenosine
  modified_base 75: mod_base = OTHER; note = 2'-O-methyladenosine
  modified_base 76: mod_base = OTHER; note = 2'-O-methyladenosine
  modified_base 77: mod_base = OTHER; note = 2'-O-methyladenosine
  modified_base 78: mod_base = OTHER; note = 2'-O-methyladenosine
  modified_base 79: mod_base = gm
  modified_base 80: mod_base = um
  modified_base 81: mod_base = gm
  modified_base 82: mod_base = gm
  modified_base 83: mod_base = cm
  modified_base 84: mod_base = OTHER; note = 2'-O-methyladenosine
  modified_base 85: mod_base = cm
  modified_base 86: mod_base = cm
  modified_base 87: mod_base = gm
  modified_base 88: mod_base = OTHER; note = 2'-O-methyladenosine
  modified_base 89: mod_base = gm
  modified_base 90: mod_base = um
  modified_base 91: mod_base = cm
  modified_base 92: mod_base = gm
  modified_base 93: mod_base = gm
  modified_base 94: mod_base = um
  modified_base 95: mod_base = gm
  modified_base 96: mod_base = cm
  modified_base 111: mod_base = OTHER; note = 2' fluoro modified base
  modified_base 112: mod_base = gm
  modified_base 113: mod_base = cm
  modified_base 116: mod_base = OTHER; note = 2' fluoro modified base
  modified_base 119: mod_base = um
  modified_base 120: mod_base = OTHER; note = Phosphorothioate (PS) linkage
  modified_base 120: mod_base = um
  modified_base 121: mod_base = OTHER; note = Phosphorothioate (PS) linkage
  modified_base 121: mod_base = um
  modified_base 122: mod_base = OTHER; note = Phosphorothioate (PS) linkage
  modified_base 122: mod_base = um
  source 1..122: mol_type = other RNA

SEQ ID NO: 1204 - RNA, 6682 nt, synthetic construct
  source 1..6682: mol_type = other RNA
agcaaaaatcaaaatcaatcatcatcacaacatcaacaatcaatcatcaacacatcatcaagacaccaccatgaaacggacagccgacggaagcgagttcgagtcaccaaagaagaagcggaaagtcgacaagaagtacagcatcggcctggacatcggcaccaactctgtgggctgggccgtgatcaccgacgagtacaaggtgcccagcaagaaattcaaggtgctgggcaacaccgaccggcacagcatcaagaagaacctgatcggagccctgctgttcgacagcggcgaaacagccgaggccacccggctgaagagaaccgccagaagaagatacaccagacggaagaaccggatctgctatctgcaagagatcttcagcaacgagatggccaaggtggacgacagcttcttccacagactggaagagtccttcctggtggaagaggataagaagcacgagcggcaccccatcttcggcaacatcgtggacgaggtggcctaccacgagaagtaccccaccatctaccacctgagaaagaaactggtggacagcaccgacaaggccgacctgcggctgatctatctggccctggcccacatgatcaagttccggggccacttcctgatcgagggcgacctgaaccccgacaacagcgacgtggacaagctgttcatccagctggtgcagacctacaaccagctgttcgaggaaaaccccatcaacgccagcggcgtggacgccaaggccatcctgtctgccagactgagcaagagcagaaagctggaaaatctgatcgcccagctgcccggcgagaagaagaatggcctgttcggaaacctgattgccctgagcctgggcctgacccccaacttcaagagcaacttcgacctggccgaggatgccaaactgcagctgagcaaggacacctacgacgacgacctggacaacctgctggcccagatcggcgaccagtacgccgacctgtttctggccgccaagaacctgtccgacgccatcctgctgagcgacatcctgagagtgaacaccgagatcaccaaggcccccctgagcgcctctatgatcaagagatacgacgagcaccaccaggacctgaccctgctgaaagctctcgtgcggcagcagctgcctgagaagtacaaagagattttcttcgaccagagcaagaacggctacgccggctacattgacggcggagccagccaggaagagttctacaagttcatcaagcccatcctggaaaagatggacggcaccgaggaactgctcgtgaagctgaagagagaggacctgctgcggaagcagcggaccttcgacaacggcagcatcccccaccagatccacctgggagagctgcacgccattctgcggcggcaggaagatttttacccattcctgaaggacaaccgggaaaagatcgagaagatcctgaccttccgcatcccctactacgtgggccctctggccaggggaaacagcagattcgcctggatgaccagaaagagcgaggaaaccatcaccccctggaacttcgaggaagtggtggacaagggcgcttccgcccagagcttcatcgagcggatgaccaacttcgataagaacctgcccaacgagaaggtgctgcccaagcacagcctgctgtacgagtacttcaccgtgtataacgagctgaccaaagtgaaatacgtgaccgagggaatgagaaagcccgccttcctgagcggcgagcagaaaaaggccatcgtggacctgctgttcaagaccaaccggaaagtgaccgtgaagcagctgaaagaggactacttcaagaaaatcgagtgcttcgactccgtggaaatctccggcgtggaagatcggttcaacgcctccctgggcacataccacgatctgctgaaaattatcaaggacaaggacttcctggacaatgaggaaaacgaggacattctggaagatatcgtgctgaccctgacactgtttgaggacagagagatgatcgaggaacggctgaaaacctatgcccacctgttcgacgacaaagtgatgaagcagctgaagcggcggagatacaccggctggggcaggctgagccggaagctgatcaacggcatccgggacaagcagtccggcaagacaatcctggatttcctgaagtccgacggcttcgccaacagaaacttcatgcagctgatccacgacgacagcctgacctttaaagaggacatccagaaagcccaggtgtccggccagggcgatagcctgcacgagcacattgccaatctggccggcagccccgccattaagaagggcatcctgcagacagtgaaggtggtggacgagctcgtgaaagtgatgggccggcacaagcccgagaacatcgtgatcgaaatggccagagagaaccagaccacccagaagggacagaagaacagccgcgagagaatgaagcggatcgaagagggcatcaaagagctgggcagccagatcctgaaagaacaccccgtggaaaacacccagctgcagaacgagaagctgtacctgtactacctgcagaatgggcgggatatgtacgtggaccaggaactggacatcaaccggctgtccgactacgatgtggacgctatcgtgcctcagagctttctgaaggacgactccatcgacaacaaggtgctgaccagaagcgacaagaaccggggcaagagcgacaacgtgccctccgaagaggtcgtgaagaagatgaagaactactggcggcagctgctgaacgccaagctgattacccagagaaagttcgacaatctgaccaaggccgagagaggcggcctgagcgaactggataaggccggcttcatcaagagacagctggtggaaacccggcagatcacaaagcacgtggcacagatcctggactcccggatgaacactaagtacgacgagaatgacaagctgatccgggaagtgaaagtgatcaccctgaagtccaagctggtgtccgatttccggaaggatttccagttttacaaagtgcgcgagatcaacaactaccaccacgcccacgacgcctacctgaacgccgtcgtgggaaccgccctgatcaaaaagtaccctaagctggaaagcgagttcgtgtacggcgactacaaggtgtacgacgtgcggaagatgatcgccaagagcgagcaggaaatcggcaaggctaccgccaagtacttcttctacagcaacatcatgaactttttcaagaccgagattaccctggccaacggcgagatccggaagcggcctctgatcgagacaaacggcgaaaccggggagatcgtgtgggataagggccgggattttgccaccgtgcggaaagtgctgagcatgccccaagtgaatatcgtgaaaaagaccgaggtgcagacaggcggcttcagcaaagagtctatcctgcccaagaggaacagcgataagctgatcgccagaaagaaggactgggaccctaagaagtacggcggcttcgacagccccaccgtggcctattctgtgctggtggtggccaaagtggaaaagggcaagtccaagaaactgaagagtgtgaaagagctgctggggatcaccatcatggaaagaagcagcttcgagaagaatcccatcgactttctggaagccaagggctacaaagaagtgaaaaaggacctgatcatcaagctgcctaagtactccctgttcgagctggaaaacggccggaagagaatgctggcctctgccggcgaactgcagaagggaaacgaactggccctgccctccaaatatgtgaacttcctgtacctggccagccactatgagaagctgaagggctcccccgaggataatgagcagaaacagctgtttgtggaacagcacaagcactacctggacgagatcatcgagcagatcagcgagttctccaagagagtgatcctggccgacgctaatctggacaaagtgctgtccgcctacaacaagcaccgggataagcccatcagagagcaggccgagaatatcatccacctgtttaccctgaccaatctgggagcccctgccgccttcaagtactttgacaccaccatcgaccggaagaggtacaccagcaccaaagaggtgctggacgccaccctgatccaccagagcatcaccggcctgtacgagacacggatcgacctgtctcagctgggaggtgactccggcggaagctctggtggcagcaagcggaccgccgacggctctgaattcgagagccctaagaagaaaagaaaggtgagcggaggctctagcggcggaagccagctggaggacgagcacagactgtttgaaaacaacgtgcggggcgatgagagaatcgctgagtggctgcagcagtatcctaaggcttgggccgaaaccgccggaatgggactggcaacagagcggccaccagtcatcgtggaactgaaatccacagctacacctatcgccgtgcggcagtaccccatggccaaggaggcctggagaggcatcaagatccacatccagagactgctgcacctcggggtgctggtgaaatgccactctccttggaacacccctctgctgcccgtgaagaaacctgggacaaacgactaccggcctgtgcaagatctgagggaagtgaacaaaagagtgcaggacatccatcccaccgttcctaacccctacaacctgctgtctagcatccccccgagccacgtgtggtacagcgtgctggacctgaaggacgccttcttctgcctgagactgcaccctgcttctcagaacatcttcgcctttgagtggcgggaccccgattctggcatgaccggccagctgacctggaccagactgcctcagggattcaagaacagcccaactatctttaacgaggccctccaccaggacctggccgccttcagagctgaccacccccaggtgaccctgctgcagtacgtggacgacctgctgctggccggcgccacaaaggaagattgcgaggccggaaccagagcactgctgctggaactgagccgtctgggctatagagccagcgccaagaaggcccagatctgccagcggagagtgacataccttggatacgccctggaaggcggcaagcggtggctgaccgaggccagaaagagcaccgtgacccaaatcccccggccccagacccctagacaagtgcgggaattcctgggaaaggccggcttctgccggctgttcatacctggcttcgcaacactggccgaacccctgtaccccctgaccaagcccggcaatccattcgagtggggcgaaacccaccagaaggcctttgataacatcaagcgggccctgctcagcgcccctgccctcgccctgccagacgtggccaaacctttcaccctgttcattgacgaaagaaaaggcgtggccagaggcgttctgacacagaccctgggcccttggaagcggcctgtggcctacctgtctaagagactggaccctgtcgccagaggatggcctggttgtctgagagctatcgccgctaccgcccttctggtcagagatgctgataagctgacactgggccagaagctgaccgtggtggctcctcacaccttggagagcatcattagacaaccacctgatagatggatgagcaacgccagaatgacccactaccagagcctgctgctgaacgaggacagagtgcatttcggcgcccctgttgtgctgaatcccgctaccctgcttcctgaggtggaccccgagggcaaagaagtgctgcactcctgcagagatatcctggctgaagagacaggccctcgcaaggacctgaaggacagtcctctggcgggccctcagctgacctggttcacagacggcagcagctacctgtacgagggcaagcgcgtggccggcgccgccgtggtcgaccaggatcgcaccatctgggccagcagcctgcctgagggaacaagcgctcagaaagctgagctgatcgccctaacccaggccctgcggctggccgagggcaacagagccaatatctacaccgactctagatacgccttcgccacagcccacgtgcacggcgctatctacagacagaggggatggctgacctccgccggcaaggaaatcaagaacaagcaggaaatcctggatctgctggaagccgtgcacgcccctagagaagtggccatcatccactgtcctggccaccagaagggcaccagcgaggtggccatgggcaatagaaaggccgacgccgaggccagacaagccgctctgggcccccgggtgttcacactggcctctggcggctcaaaaagaaccgccgacggcagcgaattcgagtctcccaagaagaagaggaaagtcggctctggccctgccgctaagagagtgaagctggactgagctggagcctcggtggccatgcttcttgccccttgggcctccccccagcccctcctccccttcctgcacccgtacccccgtggtctttgaataaagtctgagtgggcggcaaaaaaaaaaaaaaataaaaaaaaaaaaaaaaaaaaaaaaaaattaaaaaaaaaaaaaaaaaaaaaaaaaaaaaaaaaaattttaaaaaaaaaaaaaaaaaaaaaaaaaaaaaaaaaaaaaaaaaaaaaa

SEQ ID NO: 1205 - protein, 63 aa, synthetic construct
ATVKFKYKGEELEVDISKIKKVWRVGKMISFTYDLGGGKTGRGAVSEKDAPKELLQMLEKQKK

SEQ ID NO: 1206 - protein, 2163 aa, synthetic construct
MKRTADGSEFESPKKKRKVDKKYSIGLDIGTNSVGWAVITDEYKVPSKKFKVLGNTDRHSIKKNLIGALLFDSGETAEATRLKRTARRRYTRRKNRICYLQEIFSNEMAKVDDSFFHRLEESFLVEEDKKHERHPIFGNIVDEVAYHEKYPTIYHLRKKLVDSTDKADLRLIYLALAHMIKFRGHFLIEGDLNPDNSDVDKLFIQLVQTYNQLFEENPINASGVDAKAILSARLSKSRKLENLIAQLPGEKKNGLFGNLIALSLGLTPNFKSNFDLAEDAKLQLSKDTYDDDLDNLLAQIGDQYADLFLAAKNLSDAILLSDILRVNTEITKAPLSASMIKRYDEHHQDLTLLKALVRQQLPEKYKEIFFDQSKNGYAGYIDGGASQEEFYKFIKPILEKMDGTEELLVKLKREDLLRKQRTFDNGSIPHQIHLGELHAILRRQEDFYPFLKDNREKIEKILTFRIPYYVGPLARGNSRFAWMTRKSEETITPWNFEEVVDKGASAQSFIERMTNFDKNLPNEKVLPKHSLLYEYFTVYNELTKVKYVTEGMRKPAFLSGEQKKAIVDLLFKTNRKVTVKQLKEDYFKKIECFDSVEISGVEDRFNASLGTYHDLLKIIKDKDFLDNEENEDILEDIVLTLTLFEDREMIEERLKTYAHLFDDKVMKQLKRRRYTGWGRLSRKLINGIRDKQSGKTILDFLKSDGFANRNFMQLIHDDSLTFKEDIQKAQVSGQGDSLHEHIANLAGSPAIKKGILQTVKVVDELVKVMGRHKPENIVIEMARENQTTQKGQKNSRERMKRIEEGIKELGSQILKEHPVENTQLQNEKLYLYYLQNGRDMYVDQELDINRLSDYDVDAIVPQSFLKDDSIDNKVLTRSDKNRGKSDNVPSEEVVKKMKNYWRQLLNAKLITQRKFDNLTKAERGGLSELDKAGFIKRQLVETRQITKHVAQILDSRMNTKYDENDKLIREVKVITLKSKLVSDFRKDFQFYKVREINNYHHAHDAYLNAVVGTALIKKYPKLESEFVYGDYKVYDVRKMIAKSEQEIGKATAKYFFYSNIMNFFKTEITLANGEIRKRPLIETNGETGEIVWDKGRDFATVRKVLSMPQVNIVKKTEVQTGGFSKESILPKRNSDKLIARKKDWDPKKYGGFDSPTVAYSVLVVAKVEKGKSKKLKSVKELLGITIMERSSFEKNPIDFLEAKGYKEVKKDLIIKLPKYSLFELENGRKRMLASAGELQKGNELALPSKYVNFLYLASHYEKLKGSSGGSSGGSSGSETPGTSESATPESSGGSSGGSSTLNIEDEYRLHETSKEPDVSLGSTWLSDFPQAWAETGGMGLAVRQAPLIIPLKATSTPVSIKQYPMSQEARLGIKPHIQRLLDQGILVPCQSPWNTPLLPVKKPGTNDYRPVQDLREVNKRVEDIHPTVPNPYNLLSGLPPSHQWYTVLDLKDAFFCLRLHPTSQPLFAFEWRDPEMGISGQLTWTRLPQGFKNSPTLFNEALHRDLADFRIQHPDLILLQYVDDLLLAATSELDCQQGTRALLQTLGNLGYRASAKKAQICQKQVKYLGYLLKEGQRWLTEARKETVMGQPTPKTPRQLREFLGKAGFCRLFIPGFAEMAAPLYPLTKPGTLFNWGPDQQKAYQEIKQALLTAPALGLPDLTKPFELFVDEKQGYAKGVLTQKLGPWRRPVAYLSKKLDPVAAGWPPCLRMVAAIAVLTKDAGKLTMGQPLVILAPHAVEALVKQPPDRWLSNARMTHYQALLLDTDRVQFGPVVALNPATLLPLPEEGLQHNCLDILAEAHGTRPDLTDQPLPDADHTWYTDGSSLLQEGQRKAGAAVTTETEVIWAKALPAGTSAQRAELIALTQALKMAEGKKLNVYTDSRYAFATAHIHGEIYRRRGWLTSEGKEIKNKDEILALLKALFLPKRLSIIHCPGHQKGHSAEARGNRMADQAARKAAITETPDTSTLLIENSSPSGGSSGGSSGSETPGTSESATPESSGGSSGGSSPEDNEQKQLFVEQHKHYLDEIIEQISEFSKRVILADANLDKVLSAYNKHRDKPIREQAENIIHLFTLTNLGAPAAFKYFDTTIDRKRYTSTKEVLDATLIHQSITGLYETRIDLSQLGGDSGGSKRTADGSEFESPKKKRKVGSGPAAKRVKLD

SEQ ID NO: 1207 - protein, 2259 aa, synthetic construct
MKRTADGSEFESPKKKRKVDKKYSIGLDIGTNSVGWAVITDEYKVPSKKFKVLGNTDRHSIKKNLIGALLFDSGETAEATRLKRTARRRYTRRKNRICYLQEIFSNEMAKVDDSFFHRLEESFLVEEDKKHERHPIFGNIVDEVAYHEKYPTIYHLRKKLVDSTDKADLRLIYLALAHMIKFRGHFLIEGDLNPDNSDVDKLFIQLVQTYNQLFEENPINASGVDAKAILSARLSKSRKLENLIAQLPGEKKNGLFGNLIALSLGLTPNFKSNFDLAEDAKLQLSKDTYDDDLDNLLAQIGDQYADLFLAAKNLSDAILLSDILRVNTEITKAPLSASMIKRYDEHHQDLTLLKALVRQQLPEKYKEIFFDQSKNGYAGYIDGGASQEEFYKFIKPILEKMDGTEELLVKLKREDLLRKQRTFDNGSIPHQIHLGELHAILRRQEDFYPFLKDNREKIEKILTFRIPYYVGPLARGNSRFAWMTRKSEETITPWNFEEVVDKGASAQSFIERMTNFDKNLPNEKVLPKHSLLYEYFTVYNELTKVKYVTEGMRKPAFLSGEQKKAIVDLLFKTNRKVTVKQLKEDYFKKIECFDSVEISGVEDRFNASLGTYHDLLKIIKDKDFLDNEENEDILEDIVLTLTLFEDREMIEERLKTYAHLFDDKVMKQLKRRRYTGWGRLSRKLINGIRDKQSGKTILDFLKSDGFANRNFMQLIHDDSLTFKEDIQKAQVSGQGDSLHEHIANLAGSPAIKKGILQTVKVVDELVKVMGRHKPENIVIEMARENQTTQKGQKNSRERMKRIEEGIKELGSQILKEHPVENTQLQNEKLYLYYLQNGRDMYVDQELDINRLSDYDVDAIVPQSFLKDDSIDNKVLTRSDKNRGKSDNVPSEEVVKKMKNYWRQLLNAKLITQRKFDNLTKAERGGLSELDKAGFIKRQLVETRQITKHVAQILDSRMNTKYDENDKLIREVKVITLKSKLVSDFRKDFQFYKVREINNYHHAHDAYLNAVVGTALIKKYPKLESEFVYGDYKVYDVRKMIAKSEQEIGKATAKYFFYSNIMNFFKTEITLANGEIRKRPLIETNGETGEIVWDKGRDFATVRKVLSMPQVNIVKKTEVQTGGFSKESILPKRNSDKLIARKKDWDPKKYGGFDSPTVAYSVLVVAKVEKGKSKKLKSVKELLGITIMERSSFEKNPIDFLEAKGYKEVKKDLIIKLPKYSLFELENGRKRMLASAGELQKGNELALPSKYVNFLYLASHYEKLKGSSGGSSGGSSGSETPGTSESATPESSGGSSGGSSATVKFKYKGEELEVDISKIKKVWRVGKMISFTYDEGGGKTGRGAVSEKDAPKELLQMLEKQKKSGGSSGGSSGSETPGTSESATPESSGGSSGGSSTLNIEDEYRLHETSKEPDVSLGSTWLSDFPQAWAETGGMGLAVRQAPLIIPLKATSTPVSIKQYPMSQEARLGIKPHIQRLLDQGILVPCQSPWNTPLLPVKKPGTNDYRPVQDLREVNKRVEDIHPTVPNPYNLLSGLPPSHQWYTVLDLKDAFFCLRLHPTSQPLFAFEWRDPEMGISGQLTWTRLPQGFKNSPTLFNEALHRDLADFRIQHPDLILLQYVDDLLLAATSELDCQQGTRALLQTLGNLGYRASAKKAQICQKQVKYLGYLLKEGQRWLTEARKETVMGQPTPKTPRQLREFLGKAGFCRLFIPGFAEMAAPLYPLTKPGTLFNWGPDQQKAYQEIKQALLTAPALGLPDLTKPFELFVDEKQGYAKGVLTQKLGPWRRPVAYLSKKLDPVAAGWPPCLRMVAAIAVLTKDAGKLTMGQPLVILAPHAVEALVKQPPDRWLSNARMTHYQALLLDTDRVQFGPVVALNPATLLPLPEEGLQHNCLDILAEAHGTRPDLTDQPLPDADHTWYTDGSSLLQEGQRKAGAAVTTETEVIWAKALPAGTSAQRAELIALTQALKMAEGKKLNVYTDSRYAFATAHIHGEIYRRRGWLTSEGKEIKNKDEILALLKALFLPKRLSIIHCPGHQKGHSAEARGNRMADQAARKAAITETPDTSTLLIENSSPSGGSSGGSSGSETPGTSESATPESSGGSSGGSSPEDNEQKQLFVEQHKHYLDEIIEQISEFSKRVILADANLDKVLSAYNKHRDKPIREQAENIIHLFTLTNLGAPAAFKYFDTTIDRKRYTSTKEVLDATLIHQSITGLYETRIDLSQLGGDSGGSKRTADGSEFESPKKKRKVGSGPAAKRVKLD

SEQ ID NO: 1208 - protein, 2259 aa, synthetic construct
MKRTADGSEFESPKKKRKVDKKYSIGLDIGTNSVGWAVITDEYKVPSKKFKVLGNTDRHSIKKNLIGALLFDSGETAEATRLKRTARRRYTRRKNRICYLQEIFSNEMAKVDDSFFHRLEESFLVEEDKKHERHPIFGNIVDEVAYHEKYPTIYHLRKKLVDSTDKADLRLIYLALAHMIKFRGHFLIEGDLNPDNSDVDKLFIQLVQTYNQLFEENPINASGVDAKAILSARLSKSRKLENLIAQLPGEKKNGLFGNLIALSLGLTPNFKSNFDLAEDAKLQLSKDTYDDDLDNLLAQIGDQYADLFLAAKNLSDAILLSDILRVNTEITKAPLSASMIKRYDEHHQDLTLLKALVRQQLPEKYKEIFFDQSKNGYAGYIDGGASQEEFYKFIKPILEKMDGTEELLVKLKREDLLRKQRTFDNGSIPHQIHLGELHAILRRQEDFYPFLKDNREKIEKILTFRIPYYVGPLARGNSRFAWMTRKSEETITPWNFEEVVDKGASAQSFIERMTNFDKNLPNEKVLPKHSLLYEYFTVYNELTKVKYVTEGMRKPAFLSGEQKKAIVDLLFKTNRKVTVKQLKEDYFKKIECFDSVEISGVEDRFNASLGTYHDLLKIIKDKDFLDNEENEDILEDIVLTLTLFEDREMIEERLKTYAHLFDDKVMKQLKRRRYTGWGRLSRKLINGIRDKQSGKTILDFLKSDGFANRNFMQLIHDDSLTFKEDIQKAQVSGQGDSLHEHIANLAGSPAIKKGILQTVKVVDELVKVMGRHKPENIVIEMARENQTTQKGQKNSRERMKRIEEGIKELGSQILKEHPVENTQLQNEKLYLYYLQNGRDMYVDQELDINRLSDYDVDAIVPQSFLKDDSIDNKVLTRSDKNRGKSDNVPSEEVVKKMKNYWRQLLNAKLITQRKFDNLTKAERGGLSELDKAGFIKRQLVETRQITKHVAQILDSRMNTKYDENDKLIREVKVITLKSKLVSDFRKDFQFYKVREINNYHHAHDAYLNAVVGTALIKKYPKLESEFVYGDYKVYDVRKMIAKSEQEIGKATAKYFFYSNIMNFFKTEITLANGEIRKRPLIETNGETGEIVWDKGRDFATVRKVLSMPQVNIVKKTEVQTGGFSKESILPKRNSDKLIARKKDWDPKKYGGFDSPTVAYSVLVVAKVEKGKSKKLKSVKELLGITIMERSSFEKNPIDFLEAKGYKEVKKDLIIKLPKYSLFELENGRKRMLASAGELQKGNELALPSKYVNFLYLASHYEKLKGSSGGSSGGSSGSETPGTSESATPESSGGSSGGSSATVKFKYKGEEKEVDISKIKKVWRVGKMISFTYDLGGGKTGRGAVSEKDAPKELLQMLEKQKKSGGSSGGSSGSETPGTSESATPESSGGSSGGSSTLNIEDEYRLHETSKEPDVSLGSTWLSDFPQAWAETGGMGLAVRQAPLIIPLKATSTPVSIKQYPMSQEARLGIKPHIQRLLDQGILVPCQSPWNTPLLPVKKPGTNDYRPVQDLREVNKRVEDIHPTVPNPYNLLSGLPPSHQWYTVLDLKDAFFCLRLHPTSQPLFAFEWRDPEMGISGQLTWTRLPQGFKNSPTLFNEALHRDLADFRIQHPDLILLQYVDDLLLAATSELDCQQGTRALLQTLGNLGYRASAKKAQICQKQVKYLGYLLKEGQRWLTEARKETVMGQPTPKTPRQLREFLGKAGFCRLFIPGFAEMAAPLYPLTKPGTLFNWGPDQQKAYQEIKQALLTAPALGLPDLTKPFELFVDEKQGYAKGVLTQKLGPWRRPVAYLSKKLDPVAAGWPPCLRMVAAIAVLTKDAGKLTMGQPLVILAPHAVEALVKQPPDRWLSNARMTHYQALLLDTDRVQFGPVVALNPATLLPLPEEGLQHNCLDILAEAHGTRPDLTDQPLPDADHTWYTDGSSLLQEGQRKAGAAVTTETEVIWAKALPAGTSAQRAELIALTQALKMAEGKKLNVYTDSRYAFATAHIHGEIYRRRGWLTSEGKEIKNKDEILALLKALFLPKRLSIIHCPGHQKGHSAEARGNRMADQAARKAAITETPDTSTLLIENSSPSGGSSGGSSGSETPGTSESATPESSGGSSGGSSPEDNEQKQLFVEQHKHYLDEIIEQISEFSKRVILADANLDKVLSAYNKHRDKPIREQAENIIHLFTLTNLGAPAAFKYFDTTIDRKRYTSTKEVLDATLIHQSITGLYETRIDLSQLGGDSGGSKRTADGSEFESPKKKRKVGSGPAAKRVKLD

SEQ ID NO: 1209 - protein, 2259 aa, synthetic construct
MKRTADGSEFESPKKKRKVDKKYSIGLDIGTNSVGWAVITDEYKVPSKKFKVLGNTDRHSIKKNLIGALLFDSGETAEATRLKRTARRRYTRRKNRICYLQEIFSNEMAKVDDSFFHRLEESFLVEEDKKHERHPIFGNIVDEVAYHEKYPTIYHLRKKLVDSTDKADLRLIYLALAHMIKFRGHFLIEGDLNPDNSDVDKLFIQLVQTYNQLFEENPINASGVDAKAILSARLSKSRKLENLIAQLPGEKKNGLFGNLIALSLGLTPNFKSNFDLAEDAKLQLSKDTYDDDLDNLLAQIGDQYADLFLAAKNLSDAILLSDILRVNTEITKAPLSASMIKRYDEHHQDLTLLKALVRQQLPEKYKEIFFDQSKNGYAGYIDGGASQEEFYKFIKPILEKMDGTEELLVKLKREDLLRKQRTFDNGSIPHQIHLGELHAILRRQEDFYPFLKDNREKIEKILTFRIPYYVGPLARGNSRFAWMTRKSEETITPWNFEEVVDKGASAQSFIERMTNFDKNLPNEKVLPKHSLLYEYFTVYNELTKVKYVTEGMRKPAFLSGEQKKAIVDLLFKTNRKVTVKQLKEDYFKKIECFDSVEISGVEDRFNASLGTYHDLLKIIKDKDFLDNEENEDILEDIVLTLTLFEDREMIEERLKTYAHLFDDKVMKQLKRRRYTGWGRLSRKLINGIRDKQSGKTILDFLKSDGFANRNFMQLIHDDSLTFKEDIQKAQVSGQGDSLHEHIANLAGSPAIKKGILQTVKVVDELVKVMGRHKPENIVIEMARENQTTQKGQKNSRERMKRIEEGIKELGSQILKEHPVENTQLQNEKLYLYYLQNGRDMYVDQELDINRLSDYDVDAIVPQSFLKDDSIDNKVLTRSDKNRGKSDNVPSEEVVKKMKNYWRQLLNAKLITQRKFDNLTKAERGGLSELDKAGFIKRQLVETRQITKHVAQILDSRMNTKYDENDKLIREVKVITLKSKLVSDFRKDFQFYKVREINNYHHAHDAYLNAVVGTALIKKYPKLESEFVYGDYKVYDVRKMIAKSEQEIGKATAKYFFYSNIMNFFKTEITLANGEIRKRPLIETNGETGEIVWDKGRDFATVRKVLSMPQVNIVKKTEVQTGGFSKESILPKRNSDKLIARKKDWDPKKYGGFDSPTVAYSVLVVAKVEKGKSKKLKSVKELLGITIMERSSFEKNPIDFLEAKGYKEVKKDLIIKLPKYSLFELENGRKRMLASAGELQKGNELALPSKYVNFLYLASHYEKLKGSSGGSSGGSSGSETPGTSESATPESSGGSSGGSSATVKFKYKGEELEVDISKIKKVWRVGKMISFTYDLGGGKTGRGAVSEKDAPKELLQMLEKQKKSGGSSGGSSGSETPGTSESATPESSGGSSGGSSTLNIEDEYRLHETSKEPDVSLGSTWLSDFPQAWAETGGMGLAVRQAPLIIPLKATSTPVSIKQYPMSQEARLGIKPHIQRLLDQGILVPCQSPWNTPLLPVKKPGTNDYRPVQDLREVNKRVEDIHPTVPNPYNLLSGLPPSHQWYTVLDLKDAFFCLRLHPTSQPLFAFEWRDPEMGISGQLTWTRLPQGFKNSPTLFNEALHRDLADFRIQHPDLILLQYVDDLLLAATSELDCQQGTRALLQTLGNLGYRASAKKAQICQKQVKYLGYLLKEGQRWLTEARKETVMGQPTPKTPRQLREFLGKAGFCRLFIPGFAEMAAPLYPLTKPGTLFNWGPDQQKAYQEIKQALLTAPALGLPDLTKPFELFVDEKQGYAKGVLTQKLGPWRRPVAYLSKKLDPVAAGWPPCLRMVAAIAVLTKDAGKLTMGQPLVILAPHAVEALVKQPPDRWLSNARMTHYQALLLDTDRVQFGPVVALNPATLLPLPEEGLQHNCLDILAEAHGTRPDLTDQPLPDADHTWYTDGSSLLQEGQRKAGAAVTTETEVIWAKALPAGTSAQRAELIALTQALKMAEGKKLNVYTDSRYAFATAHIHGEIYRRRGWLTSEGKEIKNKDEILALLKALFLPKRLSIIHCPGHQKGHSAEARGNRMADQAARKAAITETPDTSTLLIENSSPSGGSSGGSSGSETPGTSESATPESSGGSSGGSSPEDNEQKQLFVEQHKHYLDEIIEQISEFSKRVILADANLDKVLSAYNKHRDKPIREQAENIIHLFTLTNLGAPAAFKYFDTTIDRKRYTSTKEVLDATLIHQSITGLYETRIDLSQLGGDSGGSKRTADGSEFESPKKKRKVGSGPAAKRVKLD

SEQ ID NO: 1210 - RNA, 76 nt, synthetic construct
  modified_base 9: mod_base = gm
  modified_base 10: mod_base = cm
  modified_base 11: mod_base = um
  modified_base 12: mod_base = OTHER; note = 2'-O-methyladenosine
  modified_base 13: mod_base = gm
  modified_base 14: mod_base = OTHER; note = 2'-O-methyladenosine
  modified_base 15: mod_base = OTHER; note = 2'-O-methyladenosine
  modified_base 16: mod_base = OTHER; note = 2'-O-methyladenosine
  modified_base 17: mod_base = um
  modified_base 18: mod_base = OTHER; note = 2'-O-methyladenosine
  modified_base 19: mod_base = gm
  modified_base 20: mod_base = cm
  modified_base 48: mod_base = OTHER; note = 2'-O-methyladenosine
  modified_base 49: mod_base = OTHER; note = 2'-O-methyladenosine
  modified_base 50: mod_base = cm
  modified_base 51: mod_base = um
  modified_base 52: mod_base = um
  modified_base 53: mod_base = gm
  modified_base 54: mod_base = OTHER; note = 2'-O-methyladenosine
  modified_base 55: mod_base = OTHER; note = 2'-O-methyladenosine
  modified_base 56: mod_base = OTHER; note = 2'-O-methyladenosine
  modified_base 57: mod_base = OTHER; note = 2'-O-methyladenosine
  modified_base 58: mod_base = OTHER; note = 2'-O-methyladenosine
  modified_base 59: mod_base = gm
  modified_base 60: mod_base = um
  modified_base 61: mod_base = gm
  modified_base 62: mod_base = gm
  modified_base 63: mod_base = cm
  modified_base 64: mod_base = OTHER; note = 2'-O-methyladenosine
  modified_base 65: mod_base = cm
  modified_base 66: mod_base = cm
  modified_base 67: mod_base = gm
  modified_base 68: mod_base = OTHER; note = 2'-O-methyladenosine
  modified_base 69: mod_base = gm
  modified_base 70: mod_base = um
  modified_base 71: mod_base = cm
  modified_base 72: mod_base = gm
  modified_base 73: mod_base = gm
  modified_base 74: mod_base = um
  modified_base 75: mod_base = gm
  modified_base 76: mod_base = cm
  source 1..76: mol_type = other RNA
gttttagagctagaaatagcaagttaaaataaggctagtccgttatcaacttgaaaaagtggcaccgagtcggtgc

SEQ ID NO: 1211 - RNA, 76 nt, synthetic construct; identical to SEQ ID NO: 1210
  source 1..76: mol_type = other RNA

SEQ ID NO: 1212 - RNA, 76 nt, synthetic construct; identical to SEQ ID NO: 1210
  modified_base 9: mod_base = gm
  modified_base 10: mod_base = cm
  modified_base 11: mod_base = um
  modified_base 12: mod_base = OTHER; note = 2'-O-methyladenosine
  modified_base 13: mod_base = gm
  modified_base 14: mod_base = OTHER; note = 2'-O-methyladenosine
  modified_base 15: mod_base = OTHER; note = 2'-O-methyladenosine
  modified_base 16: mod_base = OTHER; note = 2'-O-methyladenosine
  modified_base 17: mod_base = um
  modified_base 18: mod_base = OTHER; note = 2'-O-methyladenosine
  modified_base 19: mod_base = gm
  modified_base 20: mod_base = cm
  modified_base 49: mod_base = OTHER; note = 2'-O-methyladenosine
  modified_base 50: mod_base = cm
  modified_base 51: mod_base = um
  modified_base 52: mod_base = um
  modified_base 53: mod_base = gm
  modified_base 54: mod_base = OTHER; note = 2'-O-methyladenosine
  modified_base 55: mod_base = OTHER; note = 2'-O-methyladenosine
  modified_base 56: mod_base = OTHER; note = 2'-O-methyladenosine
  modified_base 57: mod_base = OTHER; note = 2'-O-methyladenosine
  modified_base 58: mod_base = OTHER; note = 2'-O-methyladenosine
  modified_base 59: mod_base = gm
  modified_base 60: mod_base = um
  modified_base 61: mod_base = gm
  modified_base 62: mod_base = gm
  modified_base 63: mod_base = cm
  modified_base 64: mod_base = OTHER; note = 2'-O-methyladenosine
  modified_base 65: mod_base = cm
  modified_base 66: mod_base = cm
  modified_base 67: mod_base = gm
  modified_base 68: mod_base = OTHER; note = 2'-O-methyladenosine
  modified_base 69: mod_base = gm
  modified_base 70: mod_base = um
  modified_base 71: mod_base = cm
  modified_base 72: mod_base = gm
  modified_base 73: mod_base = gm
  modified_base 74: mod_base = um
  modified_base 75: mod_base = gm
  modified_base 76: mod_base = cm
  source 1..76: mol_type = other RNA

SEQ ID NO: 1213 - RNA, 76 nt, synthetic construct; identical to SEQ ID NO: 1210
  modified_base 7: mod_base = gm
  modified_base 8: mod_base = OTHER; note = 2'-O-methyladenosine
  modified_base 9: mod_base = gm
  modified_base 10: mod_base = cm
  modified_base 11: mod_base = um
  modified_base 12: mod_base = OTHER; note = 2'-O-methyladenosine
  modified_base 13: mod_base = gm
  modified_base 14: mod_base = OTHER; note = 2'-O-methyladenosine
  modified_base 15: mod_base = OTHER; note = 2'-O-methyladenosine
  modified_base 16: mod_base = OTHER; note = 2'-O-methyladenosine
  modified_base 17: mod_base = um
  modified_base 18: mod_base = OTHER; note = 2'-O-methyladenosine
  modified_base 19: mod_base = gm
  modified_base 26: mod_base = OTHER; note = 2'-O-methyladenosine
  modified_base 34: mod_base = gm
  modified_base 37: mod_base = OTHER; note = 2'-O-methyladenosine
  modified_base 41: mod_base = cm
  modified_base 49: mod_base = OTHER; note = 2'-O-methyladenosine
  modified_base 50: mod_base = cm
  modified_base 51: mod_base = um
  modified_base 52: mod_base = um
  modified_base 53: mod_base = gm
  modified_base 54: mod_base = OTHER; note = 2'-O-methyladenosine
  modified_base 55: mod_base = OTHER; note = 2'-O-methyladenosine
  modified_base 56: mod_base = OTHER; note = 2'-O-methyladenosine
  modified_base 57: mod_base = OTHER; note = 2'-O-methyladenosine
  modified_base 58: mod_base = OTHER; note = 2'-O-methyladenosine
  modified_base 59: mod_base = gm
  modified_base 60: mod_base = um
  modified_base 65: mod_base = cm
  modified_base 66: mod_base = cm
  modified_base 67: mod_base = gm
  modified_base 73: mod_base = gm
  modified_base 74: mod_base = um
  modified_base 75: mod_base = gm
  modified_base 76: mod_base = cm
  source 1..76: mol_type = other RNA

SEQ ID NO: 1214 - RNA, 76 nt, synthetic construct; identical to SEQ ID NO: 1210
  modified_base 9: mod_base = gm
  modified_base 10: mod_base = cm
  modified_base 11: mod_base = um
  modified_base 12: mod_base = OTHER; note = 2'-O-methyladenosine
  modified_base 13: mod_base = gm
  modified_base 14: mod_base = OTHER; note = 2'-O-methyladenosine
  modified_base 15: mod_base = OTHER; note = 2'-O-methyladenosine
  modified_base 16: mod_base = OTHER; note = 2'-O-methyladenosine
  modified_base 17: mod_base = um
  modified_base 18: mod_base = OTHER; note = 2'-O-methyladenosine
  modified_base 19: mod_base = gm
  modified_base 20: mod_base = cm
  modified_base 26: mod_base = OTHER; note = 2'-O-methyladenosine
  modified_base 34: mod_base = gm
  modified_base 37: mod_base = OTHER; note = 2'-O-methyladenosine
  modified_base 41: mod_base = cm
  modified_base 49: mod_base = OTHER; note = 2'-O-methyladenosine
  modified_base 50: mod_base = cm
  modified_base 51: mod_base = um
  modified_base 52: mod_base = um
  modified_base 53: mod_base = gm
  modified_base 54: mod_base = OTHER; note = 2'-O-methyladenosine
  modified_base 55: mod_base = OTHER; note = 2'-O-methyladenosine
  modified_base 56: mod_base = OTHER; note = 2'-O-methyladenosine
  modified_base 57: mod_base = OTHER; note = 2'-O-methyladenosine
  modified_base 58: mod_base = OTHER; note = 2'-O-methyladenosine
  modified_base 59: mod_base = gm
  modified_base 60: mod_base = um
  modified_base 65: mod_base = cm
  modified_base 66: mod_base = cm
  modified_base 67: mod_base = gm
  modified_base 73: mod_base = gm
  modified_base 74: mod_base = um
  modified_base 75: mod_base = gm
  modified_base 76: mod_base = cm
  source 1..76: mol_type = other RNA

SEQ ID NO: 1215 - RNA, 76 nt, synthetic construct; identical to SEQ ID NO: 1210
  modified_base 1: mod_base = gm
  modified_base 7: mod_base = gm
  modified_base 8: mod_base = OTHER; note = 2'-O-methyladenosine
  modified_base 9: mod_base = gm
  modified_base 10: mod_base = cm
  modified_base 11: mod_base = um
  modified_base 12: mod_base = OTHER; note = 2'-O-methyladenosine
  modified_base 13: mod_base = gm
  modified_base 14: mod_base = OTHER; note = 2'-O-methyladenosine
  modified_base 15: mod_base = OTHER; note = 2'-O-methyladenosine
  modified_base 16: mod_base = OTHER; note = 2'-O-methyladenosine
  modified_base 17: mod_base = um
  modified_base 18: mod_base = OTHER; note = 2'-O-methyladenosine
  modified_base 19: mod_base = gm
  modified_base 26: mod_base = OTHER; note = 2'-O-methyladenosine
  modified_base 34: mod_base = gm
  modified_base 37: mod_base = OTHER; note = 2'-O-methyladenosine
  modified_base 41: mod_base = cm
  modified_base 49: mod_base = OTHER; note = 2'-O-methyladenosine
  modified_base 50: mod_base = cm
  modified_base 51: mod_base = um
  modified_base 52: mod_base = um
  modified_base 53: mod_base = gm
  modified_base 54: mod_base = OTHER; note = 2'-O-methyladenosine
  modified_base 55: mod_base = OTHER; note = 2'-O-methyladenosine
  modified_base 56: mod_base = OTHER; note = 2'-O-methyladenosine
  modified_base 57: mod_base = OTHER; note = 2'-O-methyladenosine
  modified_base 58: mod_base = OTHER; note = 2'-O-methyladenosine
  modified_base 59: mod_base = gm
  modified_base 60: mod_base = um
  modified_base 65: mod_base = cm
  modified_base 66: mod_base = cm
  modified_base 67: mod_base = gm
  modified_base 73: mod_base = gm
  modified_base 74: mod_base = um
  modified_base 75: mod_base = gm
  modified_base 76: mod_base = cm
  source 1..76: mol_type = other RNA

SEQ ID NO: 1216 - RNA, 76 nt, synthetic construct; identical to SEQ ID NO: 1210
  modified_base 1: mod_base = gm
  modified_base 9: mod_base = gm
  modified_base 10: mod_base = cm
  modified_base 11: mod_base = um
  modified_base 12: mod_base = OTHER; note = 2'-O-methyladenosine
  modified_base 13: mod_base = gm
  modified_base 14: mod_base = OTHER; note = 2'-O-methyladenosine
  modified_base 15: mod_base = OTHER; note = 2'-O-methyladenosine
  modified_base 16: mod_base = OTHER; note = 2'-O-methyladenosine
  modified_base 17: mod_base = um
  modified_base 18: mod_base = OTHER; note = 2'-O-methyladenosine
  modified_base 19: mod_base = gm
  modified_base 20: mod_base = cm
  modified_base 26: mod_base = OTHER; note = 2'-O-methyladenosine
  modified_base 34: mod_base = gm
  modified_base 37: mod_base = OTHER; note = 2'-O-methyladenosine
  modified_base 41: mod_base = cm
  modified_base 49: mod_base = OTHER; note = 2'-O-methyladenosine
  modified_base 50: mod_base = cm
  modified_base 51: mod_base = um
  modified_base 52: mod_base = um
  modified_base 53: mod_base = gm
  modified_base 54: mod_base = OTHER; note = 2'-O-methyladenosine
  modified_base 55: mod_base = OTHER; note = 2'-O-methyladenosine
  modified_base 56: mod_base = OTHER; note = 2'-O-methyladenosine
  modified_base 57: mod_base = OTHER; note = 2'-O-methyladenosine
  modified_base 58: mod_base = OTHER; note = 2'-O-methyladenosine
  modified_base 59: mod_base = gm
  modified_base 60: mod_base = um
  modified_base 65: mod_base = cm
  modified_base 66: mod_base = cm
  modified_base 67: mod_base = gm
  modified_base 73: mod_base = gm
  modified_base 74: mod_base = um
  modified_base 75: mod_base = gm
  modified_base 76: mod_base = cm
  source 1..76: mol_type = other RNA

SEQ ID NO: 1217 - RNA, 76 nt, synthetic construct; identical to SEQ ID NO: 1210
  modified_base 9: mod_base = gm
  modified_base 10: mod_base = cm
  modified_base 11: mod_base = um
  modified_base 12: mod_base = OTHER; note = 2'-O-methyladenosine
  modified_base 13: mod_base = gm
  modified_base 14: mod_base = OTHER; note = 2'-O-methyladenosine
  modified_base 15: mod_base = OTHER; note = 2'-O-methyladenosine
  modified_base 16: mod_base = OTHER; note = 2'-O-methyladenosine
  modified_base 17: mod_base = um
  modified_base 18: mod_base = OTHER; note = 2'-O-methyladenosine
  modified_base 19: mod_base = gm
  modified_base 50: mod_base = cm
  modified_base 51: mod_base = um
  modified_base 52: mod_base = um
  modified_base 53: mod_base = gm
  modified_base 54: mod_base = OTHER; note = 2'-O-methyladenosine
  modified_base 55: mod_base = OTHER; note = 2'-O-methyladenosine
  modified_base 56: mod_base = OTHER; note = 2'-O-methyladenosine
  modified_base 57: mod_base = OTHER; note = 2'-O-methyladenosine
  modified_base 58: mod_base = OTHER; note = 2'-O-methyladenosine
  modified_base 59: mod_base = gm
  modified_base 60: mod_base = um
  modified_base 63: mod_base = cm
  modified_base 64: mod_base = OTHER; note = 2'-O-methyladenosine
  modified_base 65: mod_base = cm
  modified_base 66: mod_base = cm
  modified_base 67: mod_base = gm
  modified_base 68: mod_base = OTHER; note = 2'-O-methyladenosine
  modified_base 69: mod_base = gm
  modified_base 70: mod_base = um
  modified_base 72: mod_base = gm
  modified_base 73: mod_base = gm
  modified_base 74: mod_base = um
  modified_base 75: mod_base = gm
  modified_base 76: mod_base = cm
  source 1..76: mol_type = other RNA

SEQ ID NO: 1218 - RNA, 76 nt, synthetic construct; identical to SEQ ID NO: 1210
  modified_base 9: mod_base = gm
  modified_base 10: mod_base = cm
  modified_base 11: mod_base = um
  modified_base 12: mod_base = OTHER; note = 2'-O-methyladenosine
  modified_base 13: mod_base = gm
  modified_base 14: mod_base = OTHER; note = 2'-O-methyladenosine
  modified_base 15: mod_base = OTHER; note = 2'-O-methyladenosine
  modified_base 16: mod_base = OTHER; note = 2'-O-methyladenosine
  modified_base 17: mod_base = um
  modified_base 18: mod_base = OTHER; note = 2'-O-methyladenosine
  modified_base 19: mod_base = gm
  modified_base 50: mod_base = cm
  modified_base 51: mod_base = um
  modified_base 52: mod_base = um
  modified_base 53: mod_base = gm
  modified_base 54: mod_base = OTHER; note = 2'-O-methyladenosine
  modified_base 55: mod_base = OTHER; note = 2'-O-methyladenosine
  modified_base 56: mod_base = OTHER; note = 2'-O-methyladenosine
  modified_base 57: mod_base = OTHER; note = 2'-O-methyladenosine
  modified_base 58: mod_base = OTHER; note = 2'-O-methyladenosine
  modified_base 59: mod_base = gm
  modified_base 60: mod_base = um
  modified_base 61: mod_base = gm
  modified_base 63: mod_base = cm
  modified_base 64: mod_base = OTHER; note = 2'-O-methyladenosine
  modified_base 65: mod_base = cm
  modified_base 66: mod_base = cm
  modified_base 67: mod_base = gm
  modified_base 68: mod_base = OTHER; note = 2'-O-methyladenosine
  modified_base 69: mod_base = gm
  modified_base 70: mod_base = um
  modified_base 71: mod_base = cm
  modified_base 72: mod_base = gm
  modified_base 73: mod_base = gm
  modified_base 74: mod_base = um
  modified_base 75: mod_base = gm
  modified_base 76: mod_base = cm
  source 1..76: mol_type = other RNA

SEQ ID NO: 1219 - RNA, 76 nt, synthetic construct; identical to SEQ ID NO: 1210
  modified_base 1: mod_base = gm
  modified_base 8: mod_base = OTHER; note = 2'-O-methyladenosine
  modified_base 9: mod_base = gm
  modified_base 10: mod_base = cm
  modified_base 11: mod_base = um
  modified_base 12: mod_base = OTHER; note = 2'-O-methyladenosine
  modified_base 13: mod_base = gm
  modified_base 14: mod_base = OTHER; note = 2'-O-methyladenosine
  modified_base 15: mod_base = OTHER; note = 2'-O-methyladenosine
  modified_base 16: mod_base = OTHER; note = 2'-O-methyladenosine
  modified_base 17: mod_base = um
  modified_base 18: mod_base = OTHER; note = 2'-O-methyladenosine
  modified_base 19: mod_base = gm
  modified_base 20: mod_base = cm
  modified_base 21: mod_base = OTHER; note = 2'-O-methyladenosine
  modified_base 22: mod_base = OTHER; note = 2'-O-methyladenosine
  modified_base 26: mod_base = OTHER; note = 2'-O-methyladenosine
  modified_base 28: mod_base = OTHER; note = 2'-O-methyladenosine
  modified_base 32: mod_base = OTHER; note = 2'-O-methyladenosine
  modified_base 33: mod_base = gm
  modified_base 34: mod_base = gm
  modified_base 35: mod_base = cm
  modified_base 36: mod_base = um
  modified_base 37: mod_base = OTHER; note = 2'-O-methyladenosine
  modified_base 40: mod_base = cm
  modified_base 41: mod_base = cm
  modified_base 46: mod_base = um
  modified_base 47: mod_base = cm
  modified_base 50: mod_base = cm
  modified_base 51: mod_base = um
  modified_base 52: mod_base = um
  modified_base 53: mod_base = gm
  modified_base 54: mod_base = OTHER; note = 2'-O-methyladenosine
  modified_base 55: mod_base = OTHER; note = 2'-O-methyladenosine
  modified_base 56: mod_base = OTHER; note = 2'-O-methyladenosine
  modified_base 57: mod_base = OTHER; note = 2'-O-methyladenosine
  modified_base 58: mod_base = OTHER; note = 2'-O-methyladenosine
  modified_base 59: mod_base = gm
  modified_base 60: mod_base = um
  modified_base 61: mod_base = gm
  modified_base 63: mod_base = cm
  modified_base 64: mod_base = OTHER; note = 2'-O-methyladenosine
  modified_base 65: mod_base = cm
  modified_base 66: mod_base = cm
  modified_base 67: mod_base = gm
  modified_base 68: mod_base = OTHER; note = 2'-O-methyladenosine
  modified_base 69: mod_base = gm
  modified_base 70: mod_base = um
  modified_base 71: mod_base = cm
  modified_base 72: mod_base = gm
  modified_base 73: mod_base = gm
  modified_base 74: mod_base = um
  modified_base 75: mod_base = gm
  modified_base 76: mod_base = cm
  source 1..76: mol_type = other RNA

SEQ ID NO: 1220 - RNA, 76 nt, synthetic construct; identical to SEQ ID NO: 1210
  modified_base 9: mod_base = gm
  modified_base 10: mod_base = cm
  modified_base 11: mod_base = um
  modified_base 12: mod_base = OTHER; note = 2'-O-methyladenosine
  modified_base 13: mod_base = gm
  modified_base 14: mod_base = OTHER; note = 2'-O-methyladenosine
  modified_base 15: mod_base = OTHER; note = 2'-O-methyladenosine
  modified_base 16: mod_base = OTHER; note = 2'-O-methyladenosine
  modified_base 17: mod_base = um
  modified_base 18: mod_base = OTHER; note = 2'-O-methyladenosine
  modified_base 19: mod_base = gm
  modified_base 20: mod_base = cm
  modified_base 26: mod_base = OTHER; note = 2'-O-methyladenosine
  modified_base 34: mod_base = gm
  modified_base 37: mod_base = OTHER; note = 2'-O-methyladenosine
  modified_base 41: mod_base = cm
  modified_base 50: mod_base = cm
  modified_base 51: mod_base = um
  modified_base 52: mod_base = um
  modified_base 53: mod_base = gm
  modified_base 54: mod_base = OTHER; note = 2'-O-methyladenosine
  modified_base 55: mod_base = OTHER; note = 2'-O-methyladenosine
  modified_base 56: mod_base = OTHER; note = 2'-O-methyladenosine
  modified_base 57: mod_base = OTHER; note = 2'-O-methyladenosine
  modified_base 58: mod_base = OTHER; note = 2'-O-methyladenosine
  modified_base 59: mod_base = gm
  modified_base 60: mod_base = um
  modified_base 61: mod_base = gm
  modified_base 63: mod_base = cm
  modified_base 64: mod_base = OTHER; note = 2'-O-methyladenosine
  modified_base 65: mod_base = cm
  modified_base 66: mod_base = cm
  modified_base 67: mod_base = gm
  modified_base 68: mod_base = OTHER; note = 2'-O-methyladenosine
  modified_base 69: mod_base = gm
  modified_base 70: mod_base = um
  modified_base 71: mod_base = cm
  modified_base 72: mod_base = gm
  modified_base 73: mod_base = gm
  modified_base 74: mod_base = um
  modified_base 75: mod_base = gm
  modified_base 76: mod_base = cm
  source 1..76: mol_type = other RNA

SEQ ID NO: 1221 - RNA, 76 nt, synthetic construct; identical to SEQ ID NO: 1210
  modified_base 9: mod_base = gm
  modified_base 10: mod_base = cm
  modified_base 11: mod_base = um
  modified_base 12: mod_base = OTHER; note = 2'-O-methyladenosine
  modified_base 13: mod_base = gm
  modified_base 14: mod_base = OTHER; note = 2'-O-methyladenosine
  modified_base 15: mod_base = OTHER; note = 2'-O-methyladenosine
  modified_base 16: mod_base = OTHER; note = 2'-O-methyladenosine
  modified_base 17: mod_base = um
  modified_base 18: mod_base = OTHER; note = 2'-O-methyladenosine
  modified_base 19: mod_base = gm
  modified_base 26: mod_base = OTHER; note = 2'-O-methyladenosine
  modified_base 34: mod_base = gm
  modified_base 37: mod_base = OTHER; note = 2'-O-methyladenosine
  modified_base 41: mod_base = cm
  modified_base 50: mod_base = cm
  modified_base 51: mod_base = um
  modified_base 52: mod_base = um
  modified_base 53: mod_base = gm
  modified_base 54: mod_base = OTHER; note = 2'-O-methyladenosine
  modified_base 55: mod_base = OTHER; note = 2'-O-methyladenosine
  modified_base 56: mod_base = OTHER; note = 2'-O-methyladenosine
  modified_base 57: mod_base = OTHER; note = 2'-O-methyladenosine
  modified_base 58: mod_base = OTHER; note = 2'-O-methyladenosine
  modified_base 59: mod_base = gm
  modified_base 60: mod_base = um
  modified_base 61: mod_base = gm
  modified_base 63: mod_base = cm
  modified_base 64: mod_base = OTHER; note = 2'-O-methyladenosine
  modified_base 65: mod_base = cm
  modified_base 66: mod_base = cm
  modified_base 67: mod_base = gm
  modified_base 68: mod_base = OTHER; note = 2'-O-methyladenosine
  modified_base 69: mod_base = gm
  modified_base 70: mod_base = um
  modified_base 71: mod_base = cm
  modified_base 72: mod_base = gm
  modified_base 73: mod_base = gm
  modified_base 74: mod_base = um
  modified_base 75: mod_base = gm
  modified_base 76: mod_base = cm
  source 1..76: mol_type = other RNA

SEQ ID NO: 1222 - RNA, 76 nt, synthetic construct; identical to SEQ ID NO: 1210
  modified_base 1: mod_base = gm
  modified_base 9: mod_base = gm
  modified_base 10: mod_base = cm
  modified_base 11: mod_base = um
  modified_base 12: mod_base = OTHER; note = 2'-O-methyladenosine
  modified_base 13: mod_base = gm
  modified_base 14: mod_base = OTHER; note = 2'-O-methyladenosine
  modified_base 15: mod_base = OTHER; note = 2'-O-methyladenosine
  modified_base 16: mod_base = OTHER; note = 2'-O-methyladenosine
  modified_base 17: mod_base = um
  modified_base 18: mod_base = OTHER; note = 2'-O-methyladenosine
  modified_base 19: mod_base = gm
  modified_base 20: mod_base = cm
  modified_base 26: mod_base = OTHER; note = 2'-O-methyladenosine
  modified_base 34: mod_base = gm
  modified_base 37: mod_base = OTHER; note = 2'-O-methyladenosine
  modified_base 41: mod_base = cm
  modified_base 50: mod_base = cm
  modified_base 51: mod_base = um
  modified_base 52: mod_base = um
  modified_base 53: mod_base = gm
  modified_base 54: mod_base = OTHER; note = 2'-O-methyladenosine
  modified_base 55: mod_base = OTHER; note = 2'-O-methyladenosine
  modified_base 56: mod_base = OTHER; note = 2'-O-methyladenosine
  modified_base 57: mod_base = OTHER; note = 2'-O-methyladenosine
  modified_base 58: mod_base = OTHER; note = 2'-O-methyladenosine
  modified_base 59: mod_base = gm
  modified_base 60: mod_base = um
  modified_base 61: mod_base = gm
  modified_base 63: mod_base = cm
  modified_base 64: mod_base = OTHER; note = 2'-O-methyladenosine
  modified_base 65: mod_base = cm
  modified_base 66: mod_base = cm
  modified_base 67: mod_base = gm
  modified_base 68: mod_base = OTHER; note = 2'-O-methyladenosine
  modified_base 69: mod_base = gm
  modified_base 70: mod_base = um
  modified_base 71: mod_base = cm
  modified_base 72: mod_base = gm
  modified_base 73: mod_base = gm
  modified_base 74: mod_base = um
  modified_base 75: mod_base = gm
  modified_base 76: mod_base = cm
  source 1..76: mol_type = other RNA

SEQ ID NO: 1223 - RNA, 76 nt, synthetic construct; identical to SEQ ID NO: 1210
  modified_base 1: mod_base = gm
  modified_base 9: mod_base = gm
  modified_base 10: mod_base = cm
  modified_base 11: mod_base = um
  modified_base 12: mod_base = OTHER; note = 2'-O-methyladenosine
  modified_base 13: mod_base = gm
  modified_base 14: mod_base = OTHER; note = 2'-O-methyladenosine
  modified_base 15: mod_base = OTHER; note = 2'-O-methyladenosine
  modified_base 16: mod_base = OTHER; note = 2'-O-methyladenosine
  modified_base 17: mod_base = um
  modified_base 18: mod_base = OTHER; note = 2'-O-methyladenosine
  modified_base 19: mod_base = gm
  modified_base 26: mod_base = OTHER; note = 2'-O-methyladenosine
  modified_base 34: mod_base = gm
  modified_base 37: mod_base = OTHER; note = 2'-O-methyladenosine
  modified_base 41: mod_base = cm
  modified_base 50: mod_base = cm
  modified_base 51: mod_base = um
  modified_base 52: mod_base = um
  modified_base 53: mod_base = gm
  modified_base 54: mod_base = OTHER; note = 2'-O-methyladenosine
  modified_base 55: mod_base = OTHER; note = 2'-O-methyladenosine
  modified_base 56: mod_base = OTHER; note = 2'-O-methyladenosine
  modified_base 57: mod_base = OTHER; note = 2'-O-methyladenosine
  modified_base 58: mod_base = OTHER; note = 2'-O-methyladenosine
  modified_base 59: mod_base = gm
  modified_base 60: mod_base = um
  modified_base 61: mod_base = gm
  modified_base 63: mod_base = cm
  modified_base 64: mod_base = OTHER; note = 2'-O-methyladenosine
  modified_base 65: mod_base = cm
  modified_base 66: mod_base = cm
  modified_base 67: mod_base = gm
  modified_base 68: mod_base = OTHER; note = 2'-O-methyladenosine
  modified_base 69: mod_base = gm
  modified_base 70: mod_base = um
  modified_base 71: mod_base = cm
  modified_base 72: mod_base = gm
  modified_base 73: mod_base = gm
  modified_base 74: mod_base = um
  modified_base 75: mod_base = gm
  modified_base 76: mod_base = cm
  source 1..76: mol_type = other RNA

SEQ ID NO: 1224 - RNA, 76 nt, synthetic construct; identical to SEQ ID NO: 1210
  modified_base 9: mod_base = gm
  modified_base 10: mod_base = cm
  modified_base 11: mod_base = um
  modified_base 12: mod_base = OTHER; note = 2'-O-methyladenosine
  modified_base 13: mod_base = gm
  modified_base 14: mod_base = OTHER; note = 2'-O-methyladenosine
  modified_base 15: mod_base = OTHER; note = 2'-O-methyladenosine
  modified_base 16: mod_base = OTHER; note = 2'-O-methyladenosine
  modified_base 17: mod_base = um
  modified_base 18: mod_base = OTHER; note = 2'-O-methyladenosine
  modified_base 19: mod_base = gm
  modified_base 20: mod_base = cm
  modified_base 50: mod_base = cm
  modified_base 51: mod_base = um
  modified_base 52: mod_base = um
  modified_base 53: mod_base = gm
  modified_base 54: mod_base = OTHER; note = 2'-O-methyladenosine
  modified_base 55: mod_base = OTHER; note = 2'-O-methyladenosine
  modified_base 56: mod_base = OTHER; note = 2'-O-methyladenosine
  modified_base 57: mod_base = OTHER; note = 2'-O-methyladenosine
  modified_base 58: mod_base = OTHER; note = 2'-O-methyladenosine
  modified_base 59: mod_base = gm
  modified_base 62: mod_base = gm
  modified_base 63: mod_base = cm
  modified_base 64: mod_base = OTHER; note = 2'-O-methyladenosine
  modified_base 65: mod_base = cm
  modified_base 66: mod_base = cm
  modified_base 67: mod_base = gm
  modified_base 68: mod_base = OTHER; note = 2'-O-methyladenosine
  modified_base 69: mod_base = gm
  modified_base 70: mod_base = um
  modified_base 71: mod_base = cm
  modified_base 72: mod_base = gm
  modified_base 73: mod_base = gm
  modified_base 74: mod_base = um
  modified_base 75: mod_base = gm
  modified_base 76: mod_base = cm
  source 1..76: mol_type = other RNA

SEQ ID NO: 1225 - RNA, 76 nt, synthetic construct; identical to SEQ ID NO: 1210
  modified_base 10: mod_base = cm
  modified_base 11: mod_base = um
  modified_base 12: mod_base = OTHER; note = 2'-O-methyladenosine
  modified_base 13: mod_base = gm
  modified_base 14: mod_base = OTHER; note = 2'-O-methyladenosine
  modified_base 15: mod_base = OTHER; note = 2'-O-methyladenosine
  modified_base 16: mod_base = OTHER; note = 2'-O-methyladenosine
  modified_base 17: mod_base = um
  modified_base 18: mod_base = OTHER; note = 2'-O-methyladenosine
  modified_base 19: mod_base = gm
  modified_base 48: mod_base = OTHER; note = 2'-O-methyladenosine
  modified_base 49: mod_base = OTHER; note = 2'-O-methyladenosine
  modified_base 50: mod_base = cm
  modified_base 51: mod_base = um
  modified_base 52: mod_base = um
  modified_base 53: mod_base = gm
  modified_base 54: mod_base = OTHER; note = 2'-O-methyladenosine
  modified_base 55: mod_base = OTHER; note = 2'-O-methyladenosine
  modified_base 56: mod_base = OTHER; note = 2'-O-methyladenosine
  modified_base 57: mod_base = OTHER; note = 2'-O-methyladenosine
  modified_base 58: mod_base = OTHER; note = 2'-O-methyladenosine
  modified_base 59: mod_base = gm
  modified_base 60: mod_base = um
  modified_base 61: mod_base = gm
  modified_base 62: mod_base = gm
  modified_base 63: mod_base = cm
  modified_base 64: mod_base = OTHER; note = 2'-O-methyladenosine
  modified_base 65: mod_base = cm
  modified_base 66: mod_base = cm
  modified_base 67: mod_base = gm
  modified_base 68: mod_base = OTHER; note = 2'-O-methyladenosine
  modified_base 69: mod_base = gm
  modified_base 70: mod_base = um
  modified_base 71: mod_base = cm
  modified_base 72: mod_base = gm
  modified_base 73: mod_base = gm
  modified_base 74: mod_base = um
  modified_base 75: mod_base = gm
  modified_base 76: mod_base = cm
  source 1..76: mol_type = other RNA

SEQ ID NO: 1226 - RNA, 76 nt, synthetic construct; identical to SEQ ID NO: 1210
  modified_base 9: mod_base = gm
  modified_base 10: mod_base = cm
  modified_base 11: mod_base = um
  modified_base 12: mod_base = OTHER; note = 2'-O-methyladenosine
  modified_base 13: mod_base = gm
  modified_base 14: mod_base = OTHER; note = 2'-O-methyladenosine
  modified_base 15: mod_base = OTHER; note = 2'-O-methyladenosine
  modified_base 16: mod_base = OTHER; note = 2'-O-methyladenosine
  modified_base 17: mod_base = um
  modified_base 18: mod_base = OTHER; note = 2'-O-methyladenosine
  modified_base 19: mod_base = gm
  modified_base 20: mod_base = cm
  modified_base 48: mod_base = OTHER; note = 2'-O-methyladenosine
  modified_base 49: mod_base = OTHER; note = 2'-O-methyladenosine
  modified_base 50: mod_base = cm
  modified_base 51: mod_base = um
  modified_base 52: mod_base = um
  modified_base 53: mod_base = gm
  modified_base 54: mod_base = OTHER; note = 2'-O-methyladenosine
  modified_base 55: mod_base = OTHER; note = 2'-O-methyladenosine
  modified_base 56: mod_base = OTHER; note = 2'-O-methyladenosine
  modified_base 57: mod_base = OTHER; note = 2'-O-methyladenosine
  modified_base 58: mod_base = OTHER; note = 2'-O-methyladenosine
  modified_base 59: mod_base = gm
  modified_base 60: mod_base = um
  modified_base 61: mod_base = gm
  modified_base 62: mod_base = gm
  modified_base 63: mod_base = cm
  modified_base 64: mod_base = OTHER; note = 2'-O-methyladenosine
  modified_base 65: mod_base = cm
  modified_base 66: mod_base = cm
  modified_base 67: mod_base = gm
  modified_base 73: mod_base = gm
  modified_base 74: mod_base = um
  modified_base 75: mod_base = gm
  modified_base 76: mod_base = cm
  source 1..76: mol_type = other RNA

SEQ ID NO: 1227 - RNA, 76 nt, synthetic construct; identical to SEQ ID NO: 1210
  modified_base 10: mod_base = cm
  modified_base 11: mod_base = um
  modified_base 12: mod_base = OTHER; note = 2'-O-methyladenosine
  modified_base 13: mod_base = gm
  modified_base 14: mod_base = OTHER; note = 2'-O-methyladenosine
  modified_base 15: mod_base = OTHER; note = 2'-O-methyladenosine
  modified_base 16: mod_base = OTHER; note = 2'-O-methyladenosine
  modified_base 17: mod_base = um
  modified_base 18: mod_base = OTHER; note = 2'-O-methyladenosine
  modified_base 19: mod_base = gm
  modified_base 50: mod_base = cm
  modified_base 51: mod_base = um
  modified_base 52: mod_base = um
  modified_base 53: mod_base = gm
  modified_base 54: mod_base = OTHER; note = 2'-O-methyladenosine
  modified_base 55: mod_base = OTHER; note = 2'-O-methyladenosine
  modified_base 56: mod_base = OTHER; note = 2'-O-methyladenosine
  modified_base 57: mod_base = OTHER; note = 2'-O-methyladenosine
  modified_base 58: mod_base = OTHER; note = 2'-O-methyladenosine
  modified_base 59: mod_base = gm
  modified_base 62: mod_base = gm
  modified_base 63: mod_base = cm
  modified_base 64: mod_base = OTHER; note = 2'-O-methyladenosine
  modified_base 65: mod_base = cm
  modified_base 66: mod_base = cm
  modified_base 67: mod_base = gm
  modified_base 68: mod_base = OTHER; note = 2'-O-methyladenosine
  modified_base 69: mod_base = gm
  modified_base 70: mod_base = um
  modified_base 71: mod_base = cm
  modified_base 72: mod_base = gm
  modified_base 73: mod_base = gm
  modified_base 74: mod_base = um
  modified_base 75: mod_base = gm
  modified_base 76: mod_base = cm
  source 1..76: mol_type = other RNA

SEQ ID NO: 1228 - RNA, 76 nt, synthetic construct; identical to SEQ ID NO: 1210
  modified_base 9: mod_base = gm
  modified_base 10: mod_base = cm
  modified_base 11: mod_base = um
  modified_base 12: mod_base = OTHER; note = 2'-O-methyladenosine
  modified_base 13: mod_base = gm
  modified_base 14: mod_base = OTHER; note = 2'-O-methyladenosine
  modified_base 15: mod_base = OTHER; note = 2'-O-methyladenosine
  modified_base 16: mod_base = OTHER; note = 2'-O-methyladenosine
  modified_base 17: mod_base = um
  modified_base 18: mod_base = OTHER; note = 2'-O-methyladenosine
  modified_base 19: mod_base = gm
  modified_base 20: mod_base = cm
  modified_base 50: mod_base = cm
  modified_base 51: mod_base = um
  modified_base 52: mod_base = um
  modified_base 53: mod_base = gm
  modified_base 54: mod_base = OTHER; note = 2'-O-methyladenosine
  modified_base 55: mod_base = OTHER; note = 2'-O-methyladenosine
  modified_base 56: mod_base = OTHER; note = 2'-O-methyladenosine
  modified_base 57: mod_base = OTHER; note = 2'-O-methyladenosine
  modified_base 58: mod_base = OTHER; note = 2'-O-methyladenosine
  modified_base 59: mod_base = gm
  modified_base 62: mod_base = gm
  modified_base 63: mod_base = cm
  modified_base 64: mod_base = OTHER; note = 2'-O-methyladenosine
  modified_base 65: mod_base = cm
  modified_base 66: mod_base = cm
  modified_base 67: mod_base = gm
  modified_base 73: mod_base = gm
  modified_base 74: mod_base = um
  modified_base 75: mod_base = gm
  modified_base 76: mod_base = cm
  source 1..76: mol_type = other RNA

SEQ ID NO: 1229 - RNA, 76 nt, synthetic construct; identical to SEQ ID NO: 1210
  modified_base 10: mod_base = cm
  modified_base 11: mod_base = um
  modified_base 12: mod_base = OTHER; note = 2'-O-methyladenosine
  modified_base 13: mod_base = gm
  modified_base 14: mod_base = OTHER; note = 2'-O-methyladenosine
  modified_base 15: mod_base = OTHER; note = 2'-O-methyladenosine
  modified_base 16: mod_base = OTHER; note = 2'-O-methyladenosine
  modified_base 17: mod_base = um
  modified_base 18: mod_base = OTHER; note = 2'-O-methyladenosine
  modified_base 19: mod_base = gm
  modified_base 50: mod_base = cm
  modified_base 51: mod_base = um
  modified_base 52: mod_base = um
  modified_base 53: mod_base = gm
  modified_base 54: mod_base = OTHER; note = 2'-O-methyladenosine
  modified_base 55: mod_base = OTHER; note = 2'-O-methyladenosine
  modified_base 56: mod_base = OTHER; note = 2'-O-methyladenosine
  modified_base 57: mod_base = OTHER; note = 2'-O-methyladenosine
  modified_base 58: mod_base = OTHER; note = 2'-O-methyladenosine
  modified_base 59: mod_base = gm
  modified_base 62: mod_base = gm
  modified_base 63: mod_base = cm
  modified_base 64: mod_base = OTHER; note = 2'-O-methyladenosine
  modified_base 65: mod_base = cm
  modified_base 66: mod_base = cm
  modified_base 67: mod_base = gm
  modified_base 73: mod_base = gm
  modified_base 74: mod_base = um
  modified_base 75: mod_base = gm
  modified_base 76: mod_base = cm
  source 1..76: mol_type = other RNA

SEQ ID NO: 1230 - RNA, 76 nt, synthetic construct; identical to SEQ ID NO: 1210
  modified_base 9: mod_base = OTHER; note = 2' fluoro modified base
  modified_base 10: mod_base = cm
  modified_base 11: mod_base = OTHER; note = 2' fluoro modified base
  modified_base 12: mod_base = OTHER; note = 2'-O-methyladenosine
  modified_base 13: mod_base = gm
  modified_base 14: mod_base = OTHER; note = 2'-O-methyladenosine
  modified_base 15: mod_base = OTHER; note = 2'-O-methyladenosine
  modified_base 16: mod_base = OTHER; note = 2'-O-methyladenosine
  modified_base 17: mod_base = um
  modified_base 18: mod_base = OTHER; note = 2' fluoro modified base
  modified_base 19: mod_base = gm
  modified_base 20: mod_base = OTHER; note = 2' fluoro modified base
  modified_base 48: mod_base = OTHER; note = 2' fluoro modified base
  modified_base 49: mod_base = OTHER; note = 2'-O-methyladenosine
  modified_base 50: mod_base = OTHER; note = 2' fluoro modified base
  modified_base 51: mod_base = um
  modified_base 52: mod_base = OTHER; note = 2' fluoro modified base
  modified_base 53: mod_base = gm
  modified_base 54: mod_base = OTHER; note = 2'-O-methyladenosine
  modified_base 55: mod_base = OTHER; note = 2'-O-methyladenosine
  modified_base 56: mod_base = OTHER; note = 2'-O-methyladenosine
  modified_base 57: mod_base = OTHER; note = 2' fluoro modified base
  modified_base 58: mod_base = OTHER; note = 2'-O-methyladenosine
  modified_base 59: mod_base = OTHER; note = 2' fluoro modified base
  modified_base 60: mod_base = um
  modified_base 61: mod_base = OTHER; note = 2' fluoro modified base
  modified_base 62: mod_base = gm
  modified_base 63: mod_base = OTHER; note = 2' fluoro modified base
  modified_base 64: mod_base = OTHER; note = 2'-O-methyladenosine
  modified_base 65: mod_base = OTHER; note = 2' fluoro modified base
  modified_base 66: mod_base = cm
  modified_base 67: mod_base = OTHER; note = 2' fluoro modified base
  modified_base 68: mod_base = OTHER; note = 2'-O-methyladenosine
  modified_base 69: mod_base = gm
  modified_base 70: mod_base = um
  modified_base 71: mod_base = OTHER; note = 2' fluoro modified base
  modified_base 72: mod_base = gm
  modified_base 73: mod_base = OTHER; note = 2' fluoro modified base
  modified_base 74: mod_base = um
  modified_base 75: mod_base = OTHER; note = 2' fluoro modified base
  modified_base 76: mod_base = cm
  source 1..76: mol_type = other RNA

SEQ ID NO: 1231 - RNA, 76 nt, synthetic construct; identical to SEQ ID NO: 1210
  modified_base 9: mod_base = OTHER; note = 2' fluoro modified base
  modified_base 10: mod_base = cm
  modified_base 11: mod_base = OTHER; note = 2' fluoro modified base
  modified_base 12: mod_base = OTHER; note = 2'-O-methyladenosine
  modified_base 13: mod_base = gm
  modified_base 14: mod_base = OTHER; note = 2'-O-methyladenosine
  modified_base 15: mod_base = OTHER; note = 2'-O-methyladenosine
  modified_base 16: mod_base = OTHER; note = 2'-O-methyladenosine
  modified_base 17: mod_base = um
  modified_base 18: mod_base = OTHER; note = 2' fluoro modified base
  modified_base 19: mod_base = gm
  modified_base 20: mod_base = OTHER; note = 2' fluoro modified base
  modified_base 48: mod_base = OTHER; note = 2' fluoro modified base
  modified_base 49: mod_base = OTHER; note = 2'-O-methyladenosine
  modified_base 50: mod_base = OTHER; note = 2' fluoro modified base
  modified_base 51: mod_base = um
  modified_base 52: mod_base = OTHER; note = 2' fluoro modified base
  modified_base 53: mod_base = gm
  modified_base 54: mod_base = OTHER; note = 2'-O-methyladenosine
  modified_base 55: mod_base = OTHER; note = 2'-O-methyladenosine
  modified_base 56: mod_base = OTHER; note = 2'-O-methyladenosine
  modified_base 57: mod_base = OTHER; note = 2' fluoro modified base
  modified_base 58: mod_base = OTHER; note = 2'-O-methyladenosine
  modified_base 59: mod_base = OTHER; note = 2' fluoro modified base
  modified_base 60: mod_base = um
  modified_base 61: mod_base = OTHER; note = 2' fluoro modified base
  modified_base 62: mod_base = gm
  modified_base 63: mod_base = OTHER; note = 2' fluoro modified base
  modified_base 64: mod_base = OTHER; note = 2'-O-methyladenosine
  modified_base 65: mod_base = OTHER; note = 2' fluoro modified base
  modified_base 66: mod_base = cm
  modified_base 67: mod_base = OTHER; note = 2' fluoro modified base
  modified_base 68: mod_base = OTHER; note = 2' fluoro modified base
  modified_base 69: mod_base = OTHER; note = 2' fluoro modified base
  modified_base 70: mod_base = OTHER; note = 2' fluoro modified base
  modified_base 71: mod_base = OTHER; note = 2' fluoro modified base
  modified_base 72: mod_base = gm
  modified_base 73: mod_base = OTHER; note = 2' fluoro modified base
  modified_base 74: mod_base = um
  modified_base 75: mod_base = OTHER; note = 2' fluoro modified base
  modified_base 76: mod_base = cm
  source 1..76: mol_type = other RNA

SEQ ID NO: 1232 - RNA, 76 nt, synthetic construct; identical to SEQ ID NO: 1210
  modified_base 9: mod_base = gm
  modified_base 10: mod_base = cm
  modified_base 11: mod_base = um
  modified_base 12: mod_base = OTHER; note = 2'-O-methyladenosine
  modified_base 13: mod_base = gm
  modified_base 14: mod_base = OTHER; note = 2'-O-methyladenosine
  modified_base 15: mod_base = OTHER; note = 2'-O-methyladenosine
  modified_base 16: mod_base = OTHER; note = 2'-O-methyladenosine
  modified_base 17: mod_base = um
  modified_base 18: mod_base = OTHER; note = 2'-O-methyladenosine
  modified_base 19: mod_base = gm
  modified_base 50: mod_base = cm
  modified_base 51: mod_base = um
  modified_base 52: mod_base = um
  modified_base 53: mod_base = gm
  modified_base 54: mod_base = OTHER; note = 2'-O-methyladenosine
  modified_base 55: mod_base = OTHER; note = 2'-O-methyladenosine
  modified_base 56: mod_base = OTHER; note = 2'-O-methyladenosine
  modified_base 57: mod_base = OTHER; note = 2'-O-methyladenosine
  modified_base 58: mod_base = OTHER; note = 2'-O-methyladenosine
  modified_base 59: mod_base = gm
  modified_base 62: mod_base = gm
  modified_base 65: mod_base = cm
  modified_base 66: mod_base = cm
  modified_base 67: mod_base = gm
  modified_base 74: mod_base = um
  modified_base 75: mod_base = gm
  modified_base 76: mod_base = cm
  source 1..76: mol_type = other RNA

SEQ ID NO: 1233 - RNA, 76 nt, synthetic construct; identical to SEQ ID NO: 1210
  modified_base 9: mod_base = gm
  modified_base 10: mod_base = cm
  modified_base 11: mod_base = um
  modified_base 12: mod_base = OTHER; note = 2'-O-methyladenosine
  modified_base 13: mod_base = gm
  modified_base 14: mod_base = OTHER; note = 2'-O-methyladenosine
  modified_base 15: mod_base = OTHER; note = 2'-O-methyladenosine
  modified_base 16: mod_base = OTHER; note = 2'-O-methyladenosine
  modified_base 17: mod_base = um
  modified_base 18: mod_base = OTHER; note = 2'-O-methyladenosine
  modified_base 19: mod_base = gm
  modified_base 34: mod_base = gm
  modified_base 35: mod_base = cm
  modified_base 50: mod_base = cm
  modified_base 51: mod_base = um
  modified_base 52: mod_base = um
  modified_base 53: mod_base = gm
  modified_base 54: mod_base = OTHER; note = 2'-O-methyladenosine
  modified_base 55: mod_base = OTHER; note = 2'-O-methyladenosine
  modified_base 56: mod_base = OTHER; note = 2'-O-methyladenosine
  modified_base 57: mod_base = OTHER; note = 2'-O-methyladenosine
  modified_base 58: mod_base = OTHER; note = 2'-O-methyladenosine
  modified_base 59: mod_base = gm
  modified_base 62: mod_base = gm
  modified_base 65: mod_base = cm
  modified_base 66: mod_base = cm
  modified_base 67: mod_base = gm
  modified_base 74: mod_base = um
  modified_base 75: mod_base = gm
  modified_base 76: mod_base = cm
  source 1..76: mol_type = other RNA

SEQ ID NO: 1234 - RNA, 76 nt, synthetic construct; identical to SEQ ID NO: 1210
  modified_base 9: mod_base = gm
  modified_base 10: mod_base = cm
  modified_base 11: mod_base = um
  modified_base 12: mod_base = OTHER; note = 2'-O-methyladenosine
  modified_base 13: mod_base = gm
  modified_base 14: mod_base = OTHER; note = 2'-O-methyladenosine
  modified_base 15: mod_base = OTHER; note = 2'-O-methyladenosine
  modified_base 16: mod_base = OTHER; note = 2'-O-methyladenosine
  modified_base 17: mod_base = um
  modified_base 18: mod_base = OTHER; note = 2'-O-methyladenosine
  modified_base 19: mod_base = gm
  modified_base 50: mod_base = cm
  modified_base 51: mod_base = um
  modified_base 52: mod_base = um
  modified_base 53: mod_base = gm
  modified_base 54: mod_base = OTHER; note = 2'-O-methyladenosine
  modified_base 55: mod_base = OTHER; note = 2'-O-methyladenosine
  modified_base 56: mod_base = OTHER; note = 2'-O-methyladenosine
  modified_base 58: mod_base = OTHER; note = 2'-O-methyladenosine
  modified_base 59: mod_base = gm
  modified_base 66: mod_base = cm
  modified_base 74: mod_base = um
  modified_base 75: mod_base = gm
  modified_base 76: mod_base = cm
  source 1..76: mol_type = other RNA

SEQ ID NO: 1235 - RNA, 76 nt, synthetic construct; identical to SEQ ID NO: 1210
  modified_base 9: mod_base = gm
  modified_base 10: mod_base = cm
  modified_base 11: mod_base = um
  modified_base 12: mod_base = OTHER; note = 2'-O-methyladenosine
  modified_base 13: mod_base = gm
  modified_base 14: mod_base = OTHER; note = 2'-O-methyladenosine
  modified_base 15: mod_base = OTHER; note = 2'-O-methyladenosine
  modified_base 16: mod_base = OTHER; note = 2'-O-methyladenosine
  modified_base 17: mod_base = um
  modified_base 18: mod_base = OTHER; note = 2'-O-methyladenosine
  modified_base 19: mod_base = gm
  modified_base 34: mod_base = gm
  modified_base 35: mod_base = cm
  modified_base 50: mod_base = cm
  modified_base 51: mod_base = um
  modified_base 52: mod_base = um
  modified_base 53: mod_base = gm
  modified_base 54: mod_base = OTHER; note = 2'-O-methyladenosine
  modified_base 55: mod_base = OTHER; note = 2'-O-methyladenosine
  modified_base 56: mod_base = OTHER; note = 2'-O-methyladenosine
  modified_base 58: mod_base = OTHER; note = 2'-O-methyladenosine
  modified_base 59: mod_base = gm
  modified_base 66: mod_base = cm
  modified_base 74: mod_base = um
  modified_base 75: mod_base = gm
  modified_base 76: mod_base = cm
  source 1..76: mol_type = other RNA

SEQ ID NO: 1236 - RNA, 76 nt, synthetic construct; identical to SEQ ID NO: 1210
  modified_base 10: mod_base = cm
  modified_base 11: mod_base = um
  modified_base 12: mod_base = OTHER; note = 2'-O-methyladenosine
  modified_base 13: mod_base = gm
  modified_base 14: mod_base = OTHER; note = 2'-O-methyladenosine
  modified_base 15: mod_base = OTHER; note = 2'-O-methyladenosine
  modified_base 16: mod_base = OTHER; note = 2'-O-methyladenosine
  modified_base 17: mod_base = um
  modified_base 18: mod_base = OTHER; note = 2'-O-methyladenosine
  modified_base 19: mod_base = gm
  modified_base 50: mod_base = cm
  modified_base 51: mod_base = um
  modified_base 52: mod_base = um
  modified_base 53: mod_base = gm
  modified_base 54: mod_base = OTHER; note = 2'-O-methyladenosine
  modified_base 55: mod_base = OTHER; note = 2'-O-methyladenosine
  modified_base 56: mod_base = OTHER; note = 2'-O-methyladenosine
  modified_base 57: mod_base = OTHER; note = 2'-O-methyladenosine
  modified_base 58: mod_base = OTHER; note = 2'-O-methyladenosine
  modified_base 59: mod_base = gm
  modified_base 62: mod_base = gm
  modified_base 65: mod_base = cm
  modified_base 66: mod_base = cm
  modified_base 67: mod_base = gm
  modified_base 74: mod_base = um
  modified_base 75: mod_base = gm
  modified_base 76: mod_base = cm
  source 1..76: mol_type = other RNA

SEQ ID NO: 1237 - RNA, 76 nt, synthetic construct; identical to SEQ ID NO: 1210
  modified_base 10: mod_base = cm
  modified_base 11: mod_base = um
  modified_base 12: mod_base = OTHER; note = 2'-O-methyladenosine
  modified_base 13: mod_base = gm
  modified_base 14: mod_base = OTHER; note = 2'-O-methyladenosine
  modified_base 15: mod_base = OTHER; note = 2'-O-methyladenosine
  modified_base 16: mod_base = OTHER; note = 2'-O-methyladenosine
  modified_base 17: mod_base = um
  modified_base 18: mod_base = OTHER; note = 2'-O-methyladenosine
  modified_base 19: mod_base = gm
  modified_base 34: mod_base = gm
  modified_base 35: mod_base = cm
  modified_base 50: mod_base = cm
  modified_base 51: mod_base = um
  modified_base 52: mod_base = um
  modified_base 53: mod_base = gm
  modified_base 54: mod_base = OTHER; note = 2'-O-methyladenosine
  modified_base 55: mod_base = OTHER; note = 2'-O-methyladenosine
  modified_base 56: mod_base = OTHER; note = 2'-O-methyladenosine
  modified_base 57: mod_base = OTHER; note = 2'-O-methyladenosine
  modified_base 58: mod_base = OTHER; note = 2'-O-methyladenosine
  modified_base 59: mod_base = gm
  modified_base 62: mod_base = gm
  modified_base 65: mod_base = cm
  modified_base 66: mod_base = cm
  modified_base 67: mod_base = gm
  modified_base 74: mod_base = um
  modified_base 75: mod_base = gm
  modified_base 76: mod_base = cm
  source 1..76: mol_type = other RNA

SEQ ID NO: 1238 - RNA, 76 nt, synthetic construct; identical to SEQ ID NO: 1210
  modified_base 10: mod_base = cm
  modified_base 11: mod_base = um
  modified_base 12: mod_base = OTHER; note = 2'-O-methyladenosine
  modified_base 13: mod_base = gm
  modified_base 14: mod_base = OTHER; note = 2'-O-methyladenosine
  modified_base 15: mod_base = OTHER; note = 2'-O-methyladenosine
  modified_base 16: mod_base = OTHER; note = 2'-O-methyladenosine
  modified_base 17: mod_base = um
  modified_base 18: mod_base = OTHER; note = 2'-O-methyladenosine
  modified_base 19: mod_base = gm
  modified_base 50: mod_base = cm
  modified_base 51: mod_base = um
  modified_base 52: mod_base = um
  modified_base 53: mod_base = gm
  modified_base 54: mod_base = OTHER; note = 2'-O-methyladenosine
  modified_base 55: mod_base = OTHER; note = 2'-O-methyladenosine
  modified_base 56: mod_base = OTHER; note = 2'-O-methyladenosine
  modified_base 58: mod_base = OTHER; note = 2'-O-methyladenosine
  modified_base 59: mod_base = gm
  modified_base 66: mod_base = cm
  modified_base 74: mod_base = um
  modified_base 75: mod_base = gm
  modified_base 76: mod_base = cm
  source 1..76: mol_type = other RNA

SEQ ID NO: 1239 - RNA, 76 nt, synthetic construct; identical to SEQ ID NO: 1210
  modified_base 10: mod_base = cm
  modified_base 11: mod_base = um
  modified_base 12: mod_base = OTHER; note = 2'-O-methyladenosine
  modified_base 13: mod_base = gm
  modified_base 14: mod_base = OTHER; note = 2'-O-methyladenosine
  modified_base 15: mod_base = OTHER; note = 2'-O-methyladenosine
  modified_base 16: mod_base = OTHER; note = 2'-O-methyladenosine
  modified_base 17: mod_base = um
  modified_base 18: mod_base = OTHER; note = 2'-O-methyladenosine
  modified_base 19: mod_base = gm
  modified_base 34: mod_base = gm
  modified_base 35: mod_base = cm
  modified_base 50: mod_base = cm
  modified_base 51: mod_base = um
  modified_base 52: mod_base = um
  modified_base 53: mod_base = gm
  modified_base 54: mod_base = OTHER; note = 2'-O-methyladenosine
  modified_base 55: mod_base = OTHER; note = 2'-O-methyladenosine
  modified_base 56: mod_base = OTHER; note = 2'-O-methyladenosine
  modified_base 58: mod_base = OTHER; note = 2'-O-methyladenosine
  modified_base 59: mod_base = gm
  modified_base 66: mod_base = cm
  modified_base 74: mod_base = um
  modified_base 75: mod_base = gm
  modified_base 76: mod_base = cm
  source 1..76: mol_type = other RNA

SEQ ID NO: 1240 - RNA, 76 nt, synthetic construct; identical to SEQ ID NO: 1210
  modified_base 9: mod_base = gm
  modified_base 10: mod_base = cm
  modified_base 11: mod_base = um
  modified_base 12: mod_base = OTHER; note = 2'-O-methyladenosine
  modified_base 13: mod_base = gm
  modified_base 14: mod_base = OTHER; note = 2'-O-methyladenosine
  modified_base 15: mod_base = OTHER; note = 2'-O-methyladenosine
  modified_base 16: mod_base = OTHER; note = 2'-O-methyladenosine
  modified_base 17: mod_base = um
  modified_base 18: mod_base = OTHER; note = 2'-O-methyladenosine
  modified_base 19: mod_base = gm
  modified_base 50: mod_base = cm
  modified_base 51: mod_base = um
  modified_base 52: mod_base = um
  modified_base 53: mod_base = gm
  modified_base 54: mod_base = OTHER; note = 2'-O-methyladenosine
  modified_base 55: mod_base = OTHER; note = 2'-O-methyladenosine
  modified_base 58: mod_base = OTHER; note = 2'-O-methyladenosine
  modified_base 66: mod_base = cm
  modified_base 76: mod_base = cm
  source 1..76: mol_type = other RNA

SEQ ID NO: 1241 - RNA, 76 nt, synthetic construct; identical to SEQ ID NO: 1210
  modified_base 9: mod_base = gm
  modified_base 10: mod_base = cm
  modified_base 11: mod_base = um
  modified_base 12: mod_base = OTHER; note = 2'-O-methyladenosine
  modified_base 13: mod_base = gm
  modified_base 14: mod_base = OTHER; note = 2'-O-methyladenosine
  modified_base 15: mod_base = OTHER; note = 2'-O-methyladenosine
  modified_base 16: mod_base = OTHER; note = 2'-O-methyladenosine
  modified_base 17: mod_base = um
  modified_base 18: mod_base = OTHER; note = 2'-O-methyladenosine
  modified_base 19: mod_base = gm
  modified_base 34: mod_base = gm
  modified_base 35: mod_base = cm
  modified_base 50: mod_base = cm
  modified_base 51: mod_base = um
  modified_base 52: mod_base = um
  modified_base 53: mod_base = gm
  modified_base 54: mod_base = OTHER; note = 2'-O-methyladenosine
  modified_base 55: mod_base = OTHER; note = 2'-O-methyladenosine
  modified_base 58: mod_base = OTHER; note = 2'-O-methyladenosine
  modified_base 66: mod_base = cm
  modified_base 76: mod_base = cm
  source 1..76: mol_type = other RNA

SEQ ID NO: 1242 - RNA, 75 nt, synthetic construct
  modified_base 9: mod_base = gm
  modified_base 10: mod_base = cm
  modified_base 11: mod_base = um
  modified_base 12: mod_base = OTHER; note = 2'-O-methyladenosine
  modified_base 13: mod_base = gm
  modified_base 14: mod_base = OTHER; note = 2'-O-methyladenosine
  modified_base 15: mod_base = OTHER; note = 2'-O-methyladenosine
  modified_base 16: mod_base = OTHER; note = 2'-O-methyladenosine
  modified_base 17: mod_base = um
  modified_base 18: mod_base = OTHER; note = 2'-O-methyladenosine
  modified_base 19: mod_base = gm
  modified_base 20: mod_base = cm
  modified_base 48: mod_base = OTHER; note = 2'-O-methyladenosine
  modified_base 49: mod_base = OTHER; note = 2'-O-methyladenosine
  modified_base 50: mod_base = cm
  modified_base 51: mod_base = gm
  modified_base 52: mod_base = gm
  modified_base 53: mod_base = OTHER; note = 2'-O-methyladenosine
  modified_base 54: mod_base = OTHER; note = 2'-O-methyladenosine
  modified_base 55: mod_base = OTHER; note = 2'-O-methyladenosine
  modified_base 56: mod_base = cm
  modified_base 57: mod_base = cm
  modified_base 58: mod_base = gm
  modified_base 59: mod_base = um
  modified_base 60: mod_base = gm
  modified_base 61: mod_base = gm
  modified_base 62: mod_base = cm
  modified_base 63: mod_base = OTHER; note = 2'-O-methyladenosine
  modified_base 64: mod_base = cm
  modified_base 65: mod_base = cm
  modified_base 66: mod_base = gm
  modified_base 67: mod_base = OTHER; note = 2'-O-methyladenosine
  modified_base 68: mod_base = gm
  modified_base 69: mod_base = um
  modified_base 70: mod_base = cm
  modified_base 71: mod_base = gm
  modified_base 72: mod_base = gm
  modified_base 73: mod_base = um
  modified_base 74: mod_base = gm
  modified_base 75: mod_base = cm
  source 1..75: mol_type = other RNA
gttttagagctagaaatagcaagttaaaataaggctagtccgttctcaacggaaaccgtggcaccgagtcggtgc

SEQ ID NO: 1243 - RNA, 76 nt, synthetic construct
  modified_base 9: mod_base = cm
  modified_base 10: mod_base = cm
  modified_base 11: mod_base = um
  modified_base 12: mod_base = OTHER; note = 2'-O-methyladenosine
  modified_base 13: mod_base = gm
  modified_base 14: mod_base = OTHER; note = 2'-O-methyladenosine
  modified_base 15: mod_base = OTHER; note = 2'-O-methyladenosine
  modified_base 16: mod_base = OTHER; note = 2'-O-methyladenosine
  modified_base 17: mod_base = um
  modified_base 18: mod_base = OTHER; note = 2'-O-methyladenosine
  modified_base 19: mod_base = gm
  modified_base 20: mod_base = gm
  modified_base 48: mod_base = OTHER; note = 2'-O-methyladenosine
  modified_base 49: mod_base = OTHER; note = 2'-O-methyladenosine
  modified_base 50: mod_base = cm
  modified_base 51: mod_base = cm
  modified_base 52: mod_base = um
  modified_base 53: mod_base = gm
  modified_base 54: mod_base = OTHER; note = 2'-O-methyladenosine
  modified_base 55: mod_base = OTHER; note = 2'-O-methyladenosine
  modified_base 56: mod_base = OTHER; note = 2'-O-methyladenosine
  modified_base 57: mod_base = um
  modified_base 58: mod_base = gm
  modified_base 59: mod_base = gm
  modified_base 60: mod_base = um
  modified_base 61: mod_base = gm
  modified_base 62: mod_base = gm
  modified_base 63: mod_base = cm
  modified_base 64: mod_base = OTHER; note = 2'-O-methyladenosine
  modified_base 65: mod_base = cm
  modified_base 66: mod_base = cm
  modified_base 67: mod_base = gm
  modified_base 68: mod_base = OTHER; note = 2'-O-methyladenosine
  modified_base 69: mod_base = gm
  modified_base 70: mod_base = um
  modified_base 71: mod_base = cm
  modified_base 72: mod_base = gm
  modified_base 73: mod_base = gm
  modified_base 74: mod_base = um
  modified_base 75: mod_base = gm
  modified_base 76: mod_base = cm
  source 1..76: mol_type = other RNA
gttttggacctagaaataggacgtcaaaataagcctagtgcgtgctcaacctgaaatggtggcaccgagtcggtgc

SEQ ID NO: 1244 - RNA, 76 nt, synthetic construct
  modified_base 9: mod_base = gm
  modified_base 10: mod_base = cm
  modified_base 11: mod_base = cm
  modified_base 12: mod_base = OTHER; note = 2'-O-methyladenosine
  modified_base 13: mod_base = OTHER; note = 2'-O-methyladenosine
  modified_base 14: mod_base = OTHER; note = 2'-O-methyladenosine
  modified_base 15: mod_base = OTHER; note = 2'-O-methyladenosine
  modified_base 16: mod_base = OTHER; note = 2'-O-methyladenosine
  modified_base 17: mod_base = OTHER; note = 2'-O-methyladenosine
  modified_base 18: mod_base = gm
  modified_base 19: mod_base = gm
  modified_base 20: mod_base = cm
  modified_base 48: mod_base = OTHER; note = 2'-O-methyladenosine
  modified_base 49: mod_base = OTHER; note = 2'-O-methyladenosine
  modified_base 50: mod_base = cm
  modified_base 51: mod_base = cm
  modified_base 52: mod_base = um
  modified_base 53: mod_base = gm
  modified_base 54: mod_base = OTHER; note = 2'-O-methyladenosine
  modified_base 55: mod_base = OTHER; note = 2'-O-methyladenosine
  modified_base 56: mod_base = OTHER; note = 2'-O-methyladenosine
  modified_base 57: mod_base = cm
  modified_base 58: mod_base = gm
  modified_base 59: mod_base = gm
  modified_base 60: mod_base = um
  modified_base 61: mod_base = gm
  modified_base 62: mod_base = gm
  modified_base 63: mod_base = cm
  modified_base 64: mod_base = OTHER; note = 2'-O-methyladenosine
  modified_base 65: mod_base = cm
  modified_base 66: mod_base = cm
  modified_base 67: mod_base = gm
  modified_base 68: mod_base = OTHER; note = 2'-O-methyladenosine
  modified_base 69: mod_base = gm
  modified_base 70: mod_base = um
  modified_base 71: mod_base = cm
  modified_base 72: mod_base = gm
  modified_base 73: mod_base = gm
  modified_base 74: mod_base = um
  modified_base 75: mod_base = gm
  modified_base 76: mod_base = cm
  source 1..76: mol_type = other RNA
gttttagcgccaaaaaaggcaagttaaaataaggcgagtccgccaccaacctgaaacggtggcaccgagtcggtgc

SEQ ID NO: 1245 - RNA, 76 nt, synthetic construct
  modified_base 9: mod_base = gm
  modified_base 10: mod_base = cm
  modified_base 11: mod_base = cm
  modified_base 12: mod_base = OTHER; note = 2'-O-methyladenosine
  modified_base 13: mod_base = OTHER; note = 2'-O-methyladenosine
  modified_base 14: mod_base = OTHER; note = 2'-O-methyladenosine
  modified_base 15: mod_base = OTHER; note = 2'-O-methyladenosine
  modified_base 16: mod_base = OTHER; note = 2'-O-methyladenosine
  modified_base 17: mod_base = OTHER; note = 2'-O-methyladenosine
  modified_base 18: mod_base = OTHER; note = 2'-O-methyladenosine
  modified_base 19: mod_base = gm
  modified_base 20: mod_base = cm
  modified_base 48: mod_base = OTHER; note = 2'-O-methyladenosine
  modified_base 49: mod_base = OTHER; note = 2'-O-methyladenosine
  modified_base 50: mod_base = cm
  modified_base 51: mod_base = cm
  modified_base 52: mod_base = um
  modified_base 53: mod_base = gm
  modified_base 54: mod_base = OTHER; note = 2'-O-methyladenosine
  modified_base 55: mod_base = OTHER; note = 2'-O-methyladenosine
  modified_base 56: mod_base = OTHER; note = 2'-O-methyladenosine
  modified_base 57: mod_base = cm
  modified_base 58: mod_base = gm
  modified_base 59: mod_base = gm
  modified_base 60: mod_base = um
  modified_base 61: mod_base = gm
  modified_base 62: mod_base = gm
  modified_base 63: mod_base = cm
  modified_base 64: mod_base = OTHER; note = 2'-O-methyladenosine
  modified_base 65: mod_base = cm
  modified_base 66: mod_base = cm
  modified_base 67: mod_base = gm
  modified_base 68: mod_base = OTHER; note = 2'-O-methyladenosine
  modified_base 69: mod_base = gm
  modified_base 70: mod_base = um
  modified_base 71: mod_base = cm
  modified_base 72: mod_base = gm
  modified_base 73: mod_base = gm
  modified_base 74: mod_base = um
  modified_base 75: mod_base = gm
  modified_base 76: mod_base = cm
  source 1..76: mol_type = other RNA
gttttagcgccaaaaaaagcaagttaaaataaggcgagtccgctatcaacctgaaacggtggcaccgagtcggtgc

SEQ ID NO: 1246 - RNA, 76 nt, synthetic construct
  modified_base 9: mod_base = gm
  modified_base 10: mod_base = cm
  modified_base 11: mod_base = um
  modified_base 12: mod_base = OTHER; note = 2'-O-methyladenosine
  modified_base 13: mod_base = gm
  modified_base 14: mod_base = cm
  modified_base 15: mod_base = OTHER; note = 2'-O-methyladenosine
  modified_base 16: mod_base = OTHER; note = 2'-O-methyladenosine
  modified_base 17: mod_base = um
  modified_base 18: mod_base = OTHER; note = 2'-O-methyladenosine
  modified_base 19: mod_base = gm
  modified_base 20: mod_base = cm
  modified_base 48: mod_base = OTHER; note = 2'-O-methyladenosine
  modified_base 49: mod_base = OTHER; note = 2'-O-methyladenosine
  modified_base 50: mod_base = cm
  modified_base 51: mod_base = gm
  modified_base 52: mod_base = um
  modified_base 53: mod_base = gm
  modified_base 54: mod_base = OTHER; note = 2'-O-methyladenosine
  modified_base 55: mod_base = OTHER; note = 2'-O-methyladenosine
  modified_base 56: mod_base = OTHER; note = 2'-O-methyladenosine
  modified_base 57: mod_base = cm
  modified_base 58: mod_base = cm
  modified_base 59: mod_base = gm
  modified_base 60: mod_base = um
  modified_base 61: mod_base = gm
  modified_base 62: mod_base = gm
  modified_base 63: mod_base = cm
  modified_base 64: mod_base = OTHER; note = 2'-O-methyladenosine
  modified_base 65: mod_base = cm
  modified_base 66: mod_base = cm
  modified_base 67: mod_base = gm
  modified_base 68: mod_base = OTHER; note = 2'-O-methyladenosine
  modified_base 69: mod_base = gm
  modified_base 70: mod_base = um
  modified_base 71: mod_base = cm
  modified_base 72: mod_base = gm
  modified_base 73: mod_base = gm
  modified_base 74: mod_base = um
  modified_base 75: mod_base = gm
  modified_base 76: mod_base = cm
  source 1..76: mol_type = other RNA
gttttatagctagcaatagcaagttaaaataaggctagtccgttatgaacgtgaaaccgtggcaccgagtcggtgc

SEQ ID NO: 1247 - RNA, 76 nt, synthetic construct
  modified_base 9: mod_base = gm
  modified_base 10: mod_base = cm
  modified_base 11: mod_base = um
  modified_base 12: mod_base = OTHER; note = 2'-O-methyladenosine
  modified_base 13: mod_base = gm
  modified_base 14: mod_base = OTHER; note = 2'-O-methyladenosine
  modified_base 15: mod_base = gm
  modified_base 16: mod_base = OTHER; note = 2'-O-methyladenosine
  modified_base 17: mod_base = um
  modified_base 18: mod_base = OTHER; note = 2'-O-methyladenosine
  modified_base 19: mod_base = gm
  modified_base 20: mod_base = cm
  modified_base 48: mod_base = OTHER; note = 2'-O-methyladenosine
  modified_base 49: mod_base = OTHER; note = 2'-O-methyladenosine
  modified_base 50: mod_base = cm
  modified_base 51: mod_base = gm
  modified_base 52: mod_base = OTHER; note = 2'-O-methyladenosine
  modified_base 53: mod_base = gm
  modified_base 54: mod_base = OTHER; note = 2'-O-methyladenosine
  modified_base 55: mod_base = OTHER; note = 2'-O-methyladenosine
  modified_base 56: mod_base = cm
  modified_base 57: mod_base = OTHER; note = 2'-O-methyladenosine
  modified_base 58: mod_base = cm
  modified_base 59: mod_base = gm
  modified_base 60: mod_base = um
  modified_base 61: mod_base = gm
  modified_base 62: mod_base = gm
  modified_base 63: mod_base = cm
  modified_base 64: mod_base = OTHER; note = 2'-O-methyladenosine
  modified_base 65: mod_base = cm
  modified_base 66: mod_base = cm
  modified_base 67: mod_base = gm
  modified_base 68: mod_base = OTHER; note = 2'-O-methyladenosine
  modified_base 69: mod_base = gm
  modified_base 70: mod_base = um
  modified_base 71: mod_base = cm
  modified_base 72: mod_base = gm
  modified_base 73: mod_base = gm
  modified_base 74: mod_base = um
  modified_base 75: mod_base = gm
  modified_base 76: mod_base = cm
  source 1..76: mol_type = other RNA
gttttacagctagagatagcaagttaaaataaggctagttcgttaccaacgagaacacgtggcaccgagtcggtgc

SEQ ID NO: 1248 - RNA, 76 nt, synthetic construct
  modified_base 9: mod_base = gm
  modified_base 10: mod_base = um
  modified_base 11: mod_base = cm
  modified_base 12: mod_base = OTHER; note = 2'-O-methyladenosine
  modified_base 13: mod_base = gm
  modified_base 14: mod_base = OTHER; note = 2'-O-methyladenosine
  modified_base 15: mod_base = OTHER; note = 2'-O-methyladenosine
  modified_base 16: mod_base = OTHER; note = 2'-O-methyladenosine
  modified_base 17: mod_base = um
  modified_base 18: mod_base = gm
  modified_base 19: mod_base = gm
  modified_base 20: mod_base = cm
  modified_base 48: mod_base = OTHER; note = 2'-O-methyladenosine
  modified_base 49: mod_base = OTHER; note = 2'-O-methyladenosine
  modified_base 50: mod_base = cm
  modified_base 51: mod_base = um
  modified_base 52: mod_base = gm
  modified_base 53: mod_base = gm
  modified_base 54: mod_base = cm
  modified_base 55: mod_base = OTHER; note = 2'-O-methyladenosine
  modified_base 56: mod_base = OTHER; note = 2'-O-methyladenosine
  modified_base 57: mod_base = gm
  modified_base 58: mod_base = cm
  modified_base 59: mod_base = gm
  modified_base 60: mod_base = um
  modified_base 61: mod_base = gm
  modified_base 62: mod_base = gm
  modified_base 63: mod_base = cm
  modified_base 64: mod_base = OTHER; note = 2'-O-methyladenosine
  modified_base 65: mod_base = cm
  modified_base 66: mod_base = cm
  modified_base 67: mod_base = gm
  modified_base 68: mod_base = OTHER; note = 2'-O-methyladenosine
  modified_base 69: mod_base = gm
  modified_base 70: mod_base = um
  modified_base 71: mod_base = cm
  modified_base 72: mod_base = gm
  modified_base 73: mod_base = gm
  modified_base 74: mod_base = um
  modified_base 75: mod_base = gm
  modified_base 76: mod_base = cm
  source 1..76: mol_type = other RNA
gtattcgagtcagaaatggcacgtgaatataagactagttcgtactcaactggcaagcgtggcaccgagtcggtgc

SEQ ID NO: 1249 - RNA, 76 nt, synthetic construct
  modified_base 9: mod_base = gm
  modified_base 10: mod_base = cm
  modified_base 11: mod_base = um
  modified_base 12: mod_base = gm
  modified_base 13: mod_base = gm
  modified_base 14: mod_base = OTHER; note = 2'-O-methyladenosine
  modified_base 15: mod_base = OTHER; note = 2'-O-methyladenosine
  modified_base 16: mod_base = OTHER; note = 2'-O-methyladenosine
  modified_base 17: mod_base = cm
  modified_base 18: mod_base = OTHER; note = 2'-O-methyladenosine
  modified_base 19: mod_base = gm
  modified_base 20: mod_base = cm
  modified_base 48: mod_base = OTHER; note = 2'-O-methyladenosine
  modified_base 49: mod_base = OTHER; note = 2'-O-methyladenosine
  modified_base 50: mod_base = cm
  modified_base 51: mod_base = um
  modified_base 52: mod_base = um
  modified_base 53: mod_base = gm
  modified_base 54: mod_base = OTHER; note = 2'-O-methyladenosine
  modified_base 55: mod_base = OTHER; note = 2'-O-methyladenosine
  modified_base 56: mod_base = OTHER; note = 2'-O-methyladenosine
  modified_base 57: mod_base = OTHER; note = 2'-O-methyladenosine
  modified_base 58: mod_base = OTHER; note = 2'-O-methyladenosine
  modified_base 59: mod_base = gm
  modified_base 60: mod_base = um
  modified_base 61: mod_base = gm
  modified_base 62: mod_base = gm
  modified_base 63: mod_base = cm
  modified_base 64: mod_base = OTHER; note = 2'-O-methyladenosine
  modified_base 65: mod_base = cm
  modified_base 66: mod_base = cm
  modified_base 67: mod_base = gm
  modified_base 68: mod_base = OTHER; note = 2'-O-methyladenosine
  modified_base 69: mod_base = gm
  modified_base 70: mod_base = um
  modified_base 71: mod_base = cm
  modified_base 72: mod_base = gm
  modified_base 73: mod_base = gm
  modified_base 74: mod_base = um
  modified_base 75: mod_base = gm
  modified_base 76: mod_base = cm
  source 1..76: mol_type = other RNA
gttttagagctggaaacagcaagttaaaataaggctagtccgttatcaacttgaaaaagtggcaccgagtcggtgc

SEQ ID NO: 1250 - RNA, 78 nt, synthetic construct
  modified_base 9: mod_base = gm
  modified_base 10: mod_base = cm
  modified_base 11: mod_base = um
  modified_base 12: mod_base = gm
  modified_base 13: mod_base = OTHER; note = 2'-O-methyladenosine
  modified_base 14: mod_base = gm
  modified_base 15: mod_base = OTHER; note = 2'-O-methyladenosine
  modified_base 16: mod_base = OTHER; note = 2'-O-methyladenosine
  modified_base 17: mod_base = OTHER; note = 2'-O-methyladenosine
  modified_base 18: mod_base = um
  modified_base 19: mod_base = cm
  modified_base 20: mod_base = OTHER; note = 2'-O-methyladenosine
  modified_base 48: mod_base = um
  modified_base 49: mod_base = cm
  modified_base 50: mod_base = OTHER; note = 2'-O-methyladenosine
  modified_base 51: mod_base = OTHER; note = 2'-O-methyladenosine
  modified_base 52: mod_base = cm
  modified_base 53: mod_base = um
  modified_base 54: mod_base = um
  modified_base 55: mod_base = gm
  modified_base 56: mod_base = OTHER; note = 2'-O-methyladenosine
  modified_base 57: mod_base = OTHER; note = 2'-O-methyladenosine
  modified_base 58: mod_base = OTHER; note = 2'-O-methyladenosine
  modified_base 59: mod_base = OTHER; note = 2'-O-methyladenosine
  modified_base 60: mod_base = OTHER; note = 2'-O-methyladenosine
  modified_base 61: mod_base = gm
  modified_base 62: mod_base = um
  modified_base 63: mod_base = gm
  modified_base 64: mod_base = gm
  modified_base 65: mod_base = cm
  modified_base 66: mod_base = OTHER; note = 2'-O-methyladenosine
  modified_base 67: mod_base = cm
  modified_base 68: mod_base = cm
  modified_base 69: mod_base = gm
  modified_base 70: mod_base = OTHER; note = 2'-O-methyladenosine
  modified_base 71: mod_base = gm
  modified_base 72: mod_base = um
  modified_base 73: mod_base = cm
  modified_base 74: mod_base = gm
  modified_base 75: mod_base = gm
  modified_base 76: mod_base = um
  source 1..78: mol_type = other RNA
gttttagagctgagaaatcagcaagttaaaataaggctagtccgttatcaacttgaaaaagtggcaccgagtcggtgc

SEQ ID NO: 1251 - RNA, 78 nt, synthetic construct
  modified_base 9: mod_base = gm
  modified_base 10: mod_base = cm
  modified_base 11: mod_base = um
  modified_base 12: mod_base = OTHER; note = 2'-O-methyladenosine
  modified_base 13: mod_base = gm
  modified_base 14: mod_base = OTHER; note = 2'-O-methyladenosine
  modified_base 15: mod_base = OTHER; note = 2'-O-methyladenosine
  modified_base 16: mod_base = OTHER; note = 2'-O-methyladenosine
  modified_base 17: mod_base = um
  modified_base 18: mod_base = OTHER; note = 2'-O-methyladenosine
  modified_base 19: mod_base = gm
  modified_base 20: mod_base = cm
  modified_base 48: mod_base = OTHER; note = 2'-O-methyladenosine
  modified_base 49: mod_base = OTHER; note = 2'-O-methyladenosine
  modified_base 50: mod_base = cm
  modified_base 51: mod_base = um
  modified_base 52: mod_base = gm
  modified_base 53: mod_base = um
  modified_base 54: mod_base = gm
  modified_base 55: mod_base = OTHER; note = 2'-O-methyladenosine
  modified_base 56: mod_base = OTHER; note = 2'-O-methyladenosine
  modified_base 57: mod_base = OTHER; note = 2'-O-methyladenosine
  modified_base 58: mod_base = OTHER; note = 2'-O-methyladenosine
  modified_base 59: mod_base = cm
  modified_base 60: mod_base = OTHER; note = 2'-O-methyladenosine
  modified_base 61: mod_base = gm
  modified_base 62: mod_base = um
  modified_base 63: mod_base = gm
  modified_base 64: mod_base = gm
  modified_base 65: mod_base = cm
  modified_base 66: mod_base = OTHER; note = 2'-O-methyladenosine
  modified_base 67: mod_base = cm
  modified_base 68: mod_base = cm
  modified_base 69: mod_base = gm
  modified_base 70: mod_base = OTHER; note = 2'-O-methyladenosine
  modified_base 71: mod_base = gm
  modified_base 72: mod_base = um
  modified_base 73: mod_base = cm
  modified_base 74: mod_base = gm
  modified_base 75: mod_base = gm
  modified_base 76: mod_base = um
  source 1..78: mol_type = other RNA
gttttagagctagaaatagcaagttaaaataaggctagtccgttatcaactgtgaaaacagtggcaccgagtcggtgc

SEQ ID NO: 1252 - RNA, 80 nt, synthetic construct
  modified_base 9: mod_base = gm
  modified_base 10: mod_base = cm
  modified_base 11: mod_base = um
  modified_base 12: mod_base = OTHER; note = 2'-O-methyladenosine
  modified_base 13: mod_base = gm
  modified_base 14: mod_base = OTHER; note = 2'-O-methyladenosine
  modified_base 15: mod_base = OTHER; note = 2'-O-methyladenosine
  modified_base 16: mod_base = OTHER; note = 2'-O-methyladenosine
  modified_base 17: mod_base = um
  modified_base 18: mod_base = OTHER; note = 2'-O-methyladenosine
  modified_base 19: mod_base = gm
  modified_base 20: mod_base = cm
  modified_base 48: mod_base = OTHER; note = 2'-O-methyladenosine
  modified_base 49: mod_base = OTHER; note = 2'-O-methyladenosine
  modified_base 50: mod_base = cm
  modified_base 51: mod_base = um
  modified_base 52: mod_base = gm
  modified_base 53: mod_base = gm
  modified_base 54: mod_base = um
  modified_base 55: mod_base = gm
  modified_base 56: mod_base = OTHER; note = 2'-O-methyladenosine
  modified_base 57: mod_base = OTHER; note = 2'-O-methyladenosine
  modified_base 58: mod_base = OTHER; note = 2'-O-methyladenosine
  modified_base 59: mod_base = OTHER; note = 2'-O-methyladenosine
  modified_base 60: mod_base = cm
  modified_base 61: mod_base = cm
  modified_base 62: mod_base = OTHER; note = 2'-O-methyladenosine
  modified_base 63: mod_base = gm
  modified_base 64: mod_base = um
  modified_base 65: mod_base = gm
  modified_base 66: mod_base = gm
  modified_base 67: mod_base = cm
  modified_base 68: mod_base = OTHER; note = 2'-O-methyladenosine
  modified_base 69: mod_base = cm
  modified_base 70: mod_base = cm
  modified_base 71: mod_base = gm
  modified_base 72: mod_base = OTHER; note = 2'-O-methyladenosine
  modified_base 73: mod_base = gm
  modified_base 74: mod_base = um
  modified_base 75: mod_base = cm
  modified_base 76: mod_base = gm
  source 1..80: mol_type = other RNA
gttttagagctagaaatagcaagttaaaataaggctagtccgttatcaactggtgaaaaccagtggcaccgagtcggtgc

SEQ ID NO: 1253 - RNA, 80 nt, synthetic construct
  modified_base 9: mod_base = gm
  modified_base 10: mod_base = cm
  modified_base 11: mod_base = um
  modified_base 12: mod_base = gm
  modified_base 13: mod_base = OTHER; note = 2'-O-methyladenosine
  modified_base 14: mod_base = gm
  modified_base 15: mod_base = OTHER; note = 2'-O-methyladenosine
  modified_base 16: mod_base = OTHER; note = 2'-O-methyladenosine
  modified_base 17: mod_base = OTHER; note = 2'-O-methyladenosine
  modified_base 18: mod_base = um
  modified_base 19: mod_base = cm
  modified_base 20: mod_base = OTHER; note = 2'-O-methyladenosine
  modified_base 48: mod_base = um
  modified_base 49: mod_base = cm
  modified_base 50: mod_base = OTHER; note = 2'-O-methyladenosine
  modified_base 51: mod_base = OTHER; note = 2'-O-methyladenosine
  modified_base 52: mod_base = cm
  modified_base 53: mod_base = um
  modified_base 54: mod_base = gm
  modified_base 55: mod_base = um
  modified_base 56: mod_base = gm
  modified_base 57: mod_base = OTHER; note = 2'-O-methyladenosine
  modified_base 58: mod_base = OTHER; note = 2'-O-methyladenosine
  modified_base 59: mod_base = OTHER; note = 2'-O-methyladenosine
  modified_base 60: mod_base = OTHER; note = 2'-O-methyladenosine
  modified_base 61: mod_base = cm
  modified_base 62: mod_base = OTHER; note = 2'-O-methyladenosine
  modified_base 63: mod_base = gm
  modified_base 64: mod_base = um
  modified_base 65: mod_base = gm
  modified_base 66: mod_base = gm
  modified_base 67: mod_base = cm
  modified_base 68: mod_base = OTHER; note = 2'-O-methyladenosine
  modified_base 69: mod_base = cm
  modified_base 70: mod_base = cm
  modified_base 71: mod_base = gm
  modified_base 72: mod_base = OTHER; note = 2'-O-methyladenosine
  modified_base 73: mod_base = gm
  modified_base 74: mod_base = um
  modified_base 75: mod_base = cm
  modified_base 76: mod_base = gm
  source 1..80: mol_type = other RNA
gttttagagctgagaaatcagcaagttaaaataaggctagtccgttatcaactgtgaaaacagtggcaccgagtcggtgc

SEQ ID NO: 1254 - RNA, 78 nt, synthetic construct
  modified_base 9: mod_base = gm
  modified_base 10: mod_base = cm
  modified_base 11: mod_base = um
  modified_base 12: mod_base = gm
  modified_base 13: mod_base = gm
  modified_base 14: mod_base = OTHER; note = 2'-O-methyladenosine
  modified_base 15: mod_base = OTHER; note = 2'-O-methyladenosine
  modified_base 16: mod_base = OTHER; note = 2'-O-methyladenosine
  modified_base 17: mod_base = cm
  modified_base 18: mod_base = OTHER; note = 2'-O-methyladenosine
  modified_base 19: mod_base = gm
  modified_base 20: mod_base = cm
  modified_base 48: mod_base = OTHER; note = 2'-O-methyladenosine
  modified_base 49: mod_base = OTHER; note = 2'-O-methyladenosine
  modified_base 50: mod_base = cm
  modified_base 51: mod_base = um
  modified_base 52: mod_base = gm
  modified_base 53: mod_base = um
  modified_base 54: mod_base = gm
  modified_base 55: mod_base = OTHER; note = 2'-O-methyladenosine
  modified_base 56: mod_base = OTHER; note = 2'-O-methyladenosine
  modified_base 57: mod_base = OTHER; note = 2'-O-methyladenosine
  modified_base 58: mod_base = OTHER; note = 2'-O-methyladenosine
  modified_base 59: mod_base = cm
  modified_base 60: mod_base = OTHER; note = 2'-O-methyladenosine
  modified_base 61: mod_base = gm
  modified_base 62: mod_base = um
  modified_base 63: mod_base = gm
  modified_base 64: mod_base = gm
  modified_base 65: mod_base = cm
  modified_base 66: mod_base = OTHER; note = 2'-O-methyladenosine
  modified_base 67: mod_base = cm
  modified_base 68: mod_base = cm
  modified_base 69: mod_base = gm
  modified_base 70: mod_base = OTHER; note = 2'-O-methyladenosine
  modified_base 71: mod_base = gm
  modified_base 72: mod_base = um
  modified_base 73: mod_base = cm
  modified_base 74: mod_base = gm
  modified_base 75: mod_base = gm
  modified_base 76: mod_base = um
  source 1..78: mol_type = other RNA
gttttagagctggaaacagcaagttaaaataaggctagtccgttatcaactgtgaaaacagtggcaccgagtcggtgc

SEQ ID NO: 1255 - RNA, 78 nt, synthetic construct; identical to SEQ ID NO: 1251
  modified_base 9: mod_base = gm
  modified_base 10: mod_base = cm
  modified_base 11: mod_base = um
  modified_base 12: mod_base = OTHER; note = 2'-O-methyladenosine
  modified_base 13: mod_base = gm
  modified_base 14: mod_base = OTHER; note = 2'-O-methyladenosine
  modified_base 15: mod_base = OTHER; note = 2'-O-methyladenosine
  modified_base 16: mod_base = OTHER; note = 2'-O-methyladenosine
  modified_base 17: mod_base = um
  modified_base 18: mod_base = OTHER; note = 2'-O-methyladenosine
  modified_base 19: mod_base = gm
  modified_base 20: mod_base = cm
  modified_base 48: mod_base = OTHER; note = 2'-O-methyladenosine
  modified_base 49: mod_base = OTHER; note = 2'-O-methyladenosine
  modified_base 50: mod_base = cm
  modified_base 51: mod_base = um
  modified_base 52: mod_base = gm
  modified_base 53: mod_base = um
  modified_base 54: mod_base = gm
  modified_base 55: mod_base = OTHER; note = 2'-O-methyladenosine
  modified_base 56: mod_base = OTHER; note = 2'-O-methyladenosine
  modified_base 57: mod_base = OTHER; note = 2'-O-methyladenosine
  modified_base 58: mod_base = OTHER; note = 2'-O-methyladenosine
  modified_base 59: mod_base = cm
  modified_base 60: mod_base = OTHER; note = 2'-O-methyladenosine
  modified_base 61: mod_base = gm
  modified_base 62: mod_base = um
  modified_base 63: mod_base = gm
  modified_base 64: mod_base = gm
  modified_base 65: mod_base = cm
  modified_base 66: mod_base = OTHER; note = 2'-O-methyladenosine
  modified_base 67: mod_base = cm
  modified_base 68: mod_base = cm
  modified_base 69: mod_base = gm
  modified_base 70: mod_base = OTHER; note = 2'-O-methyladenosine
  modified_base 71: mod_base = gm
  modified_base 72: mod_base = um
  modified_base 73: mod_base = cm
  modified_base 74: mod_base = gm
  modified_base 75: mod_base = gm
  modified_base 76: mod_base = um
  modified_base 77: mod_base = gm
  modified_base 78: mod_base = cm
  source 1..78: mol_type = other RNA

SEQ ID NO: 1256 - RNA, 78 nt, synthetic construct; identical to SEQ ID NO: 1251
  modified_base 9: mod_base = gm
  modified_base 10: mod_base = cm
  modified_base 11: mod_base = um
  modified_base 12: mod_base = OTHER; note = 2'-O-methyladenosine
  modified_base 13: mod_base = gm
  modified_base 14: mod_base = OTHER; note = 2'-O-methyladenosine
  modified_base 15: mod_base = OTHER; note = 2'-O-methyladenosine
  modified_base 16: mod_base = OTHER; note = 2'-O-methyladenosine
  modified_base 17: mod_base = um
  modified_base 18: mod_base = OTHER; note = 2'-O-methyladenosine
  modified_base 19: mod_base = gm
  modified_base 50: mod_base = cm
  modified_base 51: mod_base = um
  modified_base 52: mod_base = gm
  modified_base 53: mod_base = um
  modified_base 54: mod_base = gm
  modified_base 55: mod_base = OTHER; note = 2'-O-methyladenosine
  modified_base 56: mod_base = OTHER; note = 2'-O-methyladenosine
  modified_base 57: mod_base = OTHER; note = 2'-O-methyladenosine
  modified_base 58: mod_base = OTHER; note = 2'-O-methyladenosine
  modified_base 59: mod_base = cm
  modified_base 60: mod_base = OTHER; note = 2'-O-methyladenosine
  modified_base 61: mod_base = gm
  modified_base 62: mod_base = um
  modified_base 65: mod_base = cm
  modified_base 66: mod_base = OTHER; note = 2'-O-methyladenosine
  modified_base 67: mod_base = cm
  modified_base 68: mod_base = cm
  modified_base 69: mod_base = gm
  modified_base 70: mod_base = OTHER; note = 2'-O-methyladenosine
  modified_base 71: mod_base = gm
  modified_base 72: mod_base = um
  modified_base 74: mod_base = gm
  modified_base 75: mod_base = gm
  modified_base 76: mod_base = um
  modified_base 77: mod_base = gm
  modified_base 78: mod_base = cm
  source 1..78: mol_type = other RNA

SEQ ID NO: 1257 - RNA, 78 nt, synthetic construct; identical to SEQ ID NO: 1251
  modified_base 9: mod_base = gm
  modified_base 10: mod_base = cm
  modified_base 11: mod_base = um
  modified_base 12: mod_base = OTHER; note = 2'-O-methyladenosine
  modified_base 13: mod_base = gm
  modified_base 14: mod_base = OTHER; note = 2'-O-methyladenosine
  modified_base 15: mod_base = OTHER; note = 2'-O-methyladenosine
  modified_base 16: mod_base = OTHER; note = 2'-O-methyladenosine
  modified_base 17: mod_base = um
  modified_base 18: mod_base = OTHER; note = 2'-O-methyladenosine
  modified_base 19: mod_base = gm
  modified_base 26: mod_base = OTHER; note = 2'-O-methyladenosine
  modified_base 34: mod_base = gm
  modified_base 37: mod_base = OTHER; note = 2'-O-methyladenosine
  modified_base 41: mod_base = cm
  modified_base 50: mod_base = cm
  modified_base 51: mod_base = um
  modified_base 52: mod_base = gm
  modified_base 53: mod_base = um
  modified_base 54: mod_base = gm
  modified_base 55: mod_base = OTHER; note = 2'-O-methyladenosine
  modified_base 56: mod_base = OTHER; note = 2'-O-methyladenosine
  modified_base 57: mod_base = OTHER; note = 2'-O-methyladenosine
  modified_base 58: mod_base = OTHER; note = 2'-O-methyladenosine
  modified_base 59: mod_base = cm
  modified_base 60: mod_base = OTHER; note = 2'-O-methyladenosine
  modified_base 61: mod_base = gm
  modified_base 62: mod_base = um
  modified_base 63: mod_base = gm
  modified_base 65: mod_base = cm
  modified_base 66: mod_base = OTHER; note = 2'-O-methyladenosine
  modified_base 67: mod_base = cm
  modified_base 68: mod_base = cm
  modified_base 69: mod_base = gm
  modified_base 70: mod_base = OTHER; note = 2'-O-methyladenosine
  modified_base 71: mod_base = gm
  modified_base 72: mod_base = um
  modified_base 73: mod_base = cm
  modified_base 74: mod_base = gm
  modified_base 75: mod_base = gm
  modified_base 76: mod_base = um
  modified_base 77: mod_base = gm
  modified_base 78: mod_base = cm
  source 1..78: mol_type = other RNA

SEQ ID NO: 1258 - RNA, 78 nt, synthetic construct; identical to SEQ ID NO: 1251
  modified_base 9: mod_base = gm
  modified_base 10: mod_base = cm
  modified_base 11: mod_base = um
  modified_base 12: mod_base = OTHER; note = 2'-O-methyladenosine
  modified_base 13: mod_base = gm
  modified_base 14: mod_base = OTHER; note = 2'-O-methyladenosine
  modified_base 15: mod_base = OTHER; note = 2'-O-methyladenosine
  modified_base 16: mod_base = OTHER; note = 2'-O-methyladenosine
  modified_base 17: mod_base = um
  modified_base 18: mod_base = OTHER; note = 2'-O-methyladenosine
  modified_base 19: mod_base = gm
  modified_base 20: mod_base = cm
  modified_base 50: mod_base = cm
  modified_base 51: mod_base = um
  modified_base 52: mod_base = gm
  modified_base 53: mod_base = um
  modified_base 54: mod_base = gm
  modified_base 55: mod_base = OTHER; note = 2'-O-methyladenosine
  modified_base 56: mod_base = OTHER; note = 2'-O-methyladenosine
  modified_base 57: mod_base = OTHER; note = 2'-O-methyladenosine
  modified_base 58: mod_base = OTHER; note = 2'-O-methyladenosine
  modified_base 59: mod_base = cm
  modified_base 60: mod_base = OTHER; note = 2'-O-methyladenosine
  modified_base 61: mod_base = gm
  modified_base 64: mod_base = gm
  modified_base 65: mod_base = cm
  modified_base 66: mod_base = OTHER; note = 2'-O-methyladenosine
  modified_base 67: mod_base = cm
  modified_base 68: mod_base = cm
  modified_base 69: mod_base = gm
  modified_base 75: mod_base = gm
  modified_base 76: mod_base = um
  modified_base 77: mod_base = gm
  modified_base 78: mod_base = cm
  source 1..78: mol_type = other RNA

SEQ ID NO: 1259 - RNA, 78 nt, synthetic construct; identical to SEQ ID NO: 1251
  modified_base 10: mod_base = cm
  modified_base 11: mod_base = um
  modified_base 12: mod_base = OTHER; note = 2'-O-methyladenosine
  modified_base 13: mod_base = gm
  modified_base 14: mod_base = OTHER; note = 2'-O-methyladenosine
  modified_base 15: mod_base = OTHER; note = 2'-O-methyladenosine
  modified_base 16: mod_base = OTHER; note = 2'-O-methyladenosine
  modified_base 17: mod_base = um
  modified_base 18: mod_base = OTHER; note = 2'-O-methyladenosine
  modified_base 19: mod_base = gm
  modified_base 50: mod_base = cm
  modified_base 51: mod_base = um
  modified_base 52: mod_base = gm
  modified_base 53: mod_base = um
  modified_base 54: mod_base = gm
  modified_base 55: mod_base = OTHER; note = 2'-O-methyladenosine
  modified_base 56: mod_base = OTHER; note = 2'-O-methyladenosine
  modified_base 57: mod_base = OTHER; note = 2'-O-methyladenosine
  modified_base 58: mod_base = OTHER; note = 2'-O-methyladenosine
  modified_base 59: mod_base = cm
  modified_base 60: mod_base = OTHER; note = 2'-O-methyladenosine
  modified_base 61: mod_base = gm
  modified_base 64: mod_base = gm
  modified_base 65: mod_base = cm
  modified_base 66: mod_base = OTHER; note = 2'-O-methyladenosine
  modified_base 67: mod_base = cm
  modified_base 68: mod_base = cm
  modified_base 69: mod_base = gm
  modified_base 75: mod_base = gm
  modified_base 76: mod_base = um
  modified_base 77: mod_base = gm
  modified_base 78: mod_base = cm
  source 1..78: mol_type = other RNA

SEQ ID NO: 1260 - RNA, 78 nt, synthetic construct; identical to SEQ ID NO: 1251
  modified_base 9: mod_base = gm
  modified_base 10: mod_base = cm
  modified_base 11: mod_base = um
  modified_base 12: mod_base = OTHER; note = 2'-O-methyladenosine
  modified_base 13: mod_base = gm
  modified_base 14: mod_base = OTHER; note = 2'-O-methyladenosine
  modified_base 15: mod_base = OTHER; note = 2'-O-methyladenosine
  modified_base 16: mod_base = OTHER; note = 2'-O-methyladenosine
  modified_base 17: mod_base = um
  modified_base 18: mod_base = OTHER; note = 2'-O-methyladenosine
  modified_base 19: mod_base = gm
  modified_base 50: mod_base = cm
  modified_base 51: mod_base = um
  modified_base 52: mod_base = gm
  modified_base 53: mod_base = um
  modified_base 54: mod_base = gm
  modified_base 55: mod_base = OTHER; note = 2'-O-methyladenosine
  modified_base 56: mod_base = OTHER; note = 2'-O-methyladenosine
  modified_base 57: mod_base = OTHER; note = 2'-O-methyladenosine
  modified_base 58: mod_base = OTHER; note = 2'-O-methyladenosine
  modified_base 59: mod_base = cm
  modified_base 60: mod_base = OTHER; note = 2'-O-methyladenosine
  modified_base 61: mod_base = gm
  modified_base 64: mod_base = gm
  modified_base 67: mod_base = cm
  modified_base 68: mod_base = cm
  modified_base 69: mod_base = gm
  modified_base 76: mod_base = um
  modified_base 77: mod_base = gm
  modified_base 78: mod_base = cm
  source 1..78: mol_type = other RNA

SEQ ID NO: 1261 - RNA, 78 nt, synthetic construct; identical to SEQ ID NO: 1251
  modified_base 9: mod_base = gm
  modified_base 10: mod_base = cm
  modified_base 11: mod_base = um
  modified_base 12: mod_base = OTHER; note = 2'-O-methyladenosine
  modified_base 13: mod_base = gm
  modified_base 14: mod_base = OTHER; note = 2'-O-methyladenosine
  modified_base 15: mod_base = OTHER; note = 2'-O-methyladenosine
  modified_base 16: mod_base = OTHER; note = 2'-O-methyladenosine
  modified_base 17: mod_base = um
  modified_base 18: mod_base = OTHER; note = 2'-O-methyladenosine
  modified_base 19: mod_base = gm
  modified_base 34: mod_base = gm
  modified_base 35: mod_base = cm
  modified_base 50: mod_base = cm
  modified_base 51: mod_base = um
  modified_base 52: mod_base = gm
  modified_base 53: mod_base = um
  modified_base 54: mod_base = gm
  modified_base 55: mod_base = OTHER; note = 2'-O-methyladenosine
  modified_base 56: mod_base = OTHER; note = 2'-O-methyladenosine
  modified_base 57: mod_base = OTHER; note = 2'-O-methyladenosine
  modified_base 58: mod_base = OTHER; note = 2'-O-methyladenosine
  modified_base 59: mod_base = cm
  modified_base 60: mod_base = OTHER; note = 2'-O-methyladenosine
  modified_base 61: mod_base = gm
  modified_base 64: mod_base = gm
  modified_base 67: mod_base = cm
  modified_base 68: mod_base = cm
  modified_base 69: mod_base = gm
  modified_base 76: mod_base = um
  modified_base 77: mod_base = gm
  modified_base 78: mod_base = cm
  source 1..78: mol_type = other RNA

SEQ ID NO: 1262 - RNA, 78 nt, synthetic construct; identical to SEQ ID NO: 1251
  modified_base 9: mod_base = gm
  modified_base 10: mod_base = cm
  modified_base 11: mod_base = um
  modified_base 12: mod_base = OTHER; note = 2'-O-methyladenosine
  modified_base 13: mod_base = gm
  modified_base 14: mod_base = OTHER; note = 2'-O-methyladenosine
  modified_base 15: mod_base = OTHER; note = 2'-O-methyladenosine
  modified_base 16: mod_base = OTHER; note = 2'-O-methyladenosine
  modified_base 17: mod_base = um
  modified_base 18: mod_base = OTHER; note = 2'-O-methyladenosine
  modified_base 19: mod_base = gm
  modified_base 50: mod_base = cm
  modified_base 51: mod_base = um
  modified_base 52: mod_base = gm
  modified_base 53: mod_base = um
  modified_base 54: mod_base = gm
  modified_base 55: mod_base = OTHER; note = 2'-O-methyladenosine
  modified_base 56: mod_base = OTHER; note = 2'-O-methyladenosine
  modified_base 57: mod_base = OTHER; note = 2'-O-methyladenosine
  modified_base 59: mod_base = cm
  modified_base 60: mod_base = OTHER; note = 2'-O-methyladenosine
  modified_base 61: mod_base = gm
  modified_base 68: mod_base = cm
  modified_base 76: mod_base = um
  modified_base 77: mod_base = gm
  modified_base 78: mod_base = cm
  source 1..78: mol_type = other RNA

SEQ ID NO: 1263 - RNA, 78 nt, synthetic construct; identical to SEQ ID NO: 1251
  modified_base 10: mod_base = cm
  modified_base 11: mod_base = um
  modified_base 12: mod_base = OTHER; note = 2'-O-methyladenosine
  modified_base 13: mod_base = gm
  modified_base 14: mod_base = OTHER; note = 2'-O-methyladenosine
  modified_base 15: mod_base = OTHER; note = 2'-O-methyladenosine
  modified_base 16: mod_base = OTHER; note = 2'-O-methyladenosine
  modified_base 17: mod_base = um
  modified_base 18: mod_base = OTHER; note = 2'-O-methyladenosine
  modified_base 19: mod_base = gm
  modified_base 34: mod_base = gm
  modified_base 35: mod_base = cm
  modified_base 50: mod_base = cm
  modified_base 51: mod_base = um
  modified_base 52: mod_base = gm
  modified_base 53: mod_base = um
  modified_base 54: mod_base = gm
  modified_base 55: mod_base = OTHER; note = 2'-O-methyladenosine
  modified_base 56: mod_base = OTHER; note = 2'-O-methyladenosine
  modified_base 57: mod_base = OTHER; note = 2'-O-methyladenosine
  modified_base 58: mod_base = OTHER; note = 2'-O-methyladenosine
  modified_base 59: mod_base = cm
  modified_base 60: mod_base = OTHER; note = 2'-O-methyladenosine
  modified_base 61: mod_base = gm
  modified_base 64: mod_base = gm
  modified_base 67: mod_base = cm
  modified_base 68: mod_base = cm
  modified_base 69: mod_base = gm
  modified_base 76: mod_base = um
  modified_base 77: mod_base = gm
  modified_base 78: mod_base = cm
  source 1..78: mol_type = other RNA

SEQ ID NO: 1264 - RNA, 78 nt, synthetic construct; identical to SEQ ID NO: 1251
  modified_base 10: mod_base = cm
  modified_base 11: mod_base = um
  modified_base 12: mod_base = OTHER; note = 2'-O-methyladenosine
  modified_base 13: mod_base = gm
  modified_base 14: mod_base = OTHER; note = 2'-O-methyladenosine
  modified_base 15: mod_base = OTHER; note = 2'-O-methyladenosine
  modified_base 16: mod_base = OTHER; note = 2'-O-methyladenosine
  modified_base 17: mod_base = um
  modified_base 18: mod_base = OTHER; note = 2'-O-methyladenosine
  modified_base 19: mod_base = gm
  modified_base 34: mod_base = gm
  modified_base 35: mod_base = cm
  modified_base 50: mod_base = cm
  modified_base 51: mod_base = um
  modified_base 52: mod_base = gm
  modified_base 53: mod_base = um
  modified_base 54: mod_base = gm
  modified_base 55: mod_base = OTHER; note = 2'-O-methyladenosine
  modified_base 56: mod_base = OTHER; note = 2'-O-methyladenosine
  modified_base 57: mod_base = OTHER; note = 2'-O-methyladenosine
  modified_base 59: mod_base = cm
  modified_base 60: mod_base = OTHER; note = 2'-O-methyladenosine
  modified_base 61: mod_base = gm
  modified_base 68: mod_base = cm
  modified_base 76: mod_base = um
  modified_base 77: mod_base = gm
  modified_base 78: mod_base = cm
  source 1..78: mol_type = other RNA

SEQ ID NO: 1265 - RNA, 78 nt, synthetic construct; identical to SEQ ID NO: 1251
  modified_base 9: mod_base = gm
  modified_base 10: mod_base = cm
  modified_base 11: mod_base = um
  modified_base 12: mod_base = OTHER; note = 2'-O-methyladenosine
  modified_base 13: mod_base = gm
  modified_base 14: mod_base = OTHER; note = 2'-O-methyladenosine
  modified_base 15: mod_base = OTHER; note = 2'-O-methyladenosine
  modified_base 16: mod_base = OTHER; note = 2'-O-methyladenosine
  modified_base 17: mod_base = um
  modified_base 18: mod_base = OTHER; note = 2'-O-methyladenosine
  modified_base 19: mod_base = gm
  modified_base 50: mod_base = cm
  modified_base 51: mod_base = um
  modified_base 52: mod_base = gm
  modified_base 53: mod_base = um
  modified_base 54: mod_base = gm
  modified_base 55: mod_base = OTHER; note = 2'-O-methyladenosine
  modified_base 56: mod_base = OTHER; note = 2'-O-methyladenosine
  modified_base 59: mod_base = cm
  modified_base 60: mod_base = OTHER; note = 2'-O-methyladenosine
  modified_base 68: mod_base = cm
  modified_base 78: mod_base = cm
  source 1..78: mol_type = other RNA

SEQ ID NO: 1266 - RNA, 78 nt, synthetic construct; identical to SEQ ID NO: 1251
  modified_base 9: mod_base = gm
  modified_base 10: mod_base = cm
  modified_base 11: mod_base = um
  modified_base 12: mod_base = OTHER; note = 2'-O-methyladenosine
  modified_base 13: mod_base = gm
  modified_base 14: mod_base = OTHER; note = 2'-O-methyladenosine
  modified_base 15: mod_base = OTHER; note = 2'-O-methyladenosine
  modified_base 16: mod_base = OTHER; note = 2'-O-methyladenosine
  modified_base 17: mod_base = um
  modified_base 18: mod_base = OTHER; note = 2'-O-methyladenosine
  modified_base 19: mod_base = gm
  modified_base 34: mod_base = gm
  modified_base 35: mod_base = cm
  modified_base 50: mod_base = cm
  modified_base 51: mod_base = um
  modified_base 52: mod_base = gm
  modified_base 53: mod_base = um
  modified_base 54: mod_base = gm
  modified_base 55: mod_base = OTHER; note = 2'-O-methyladenosine
  modified_base 56: mod_base = OTHER; note = 2'-O-methyladenosine
  modified_base 59: mod_base = cm
  modified_base 60: mod_base = OTHER; note = 2'-O-methyladenosine
  modified_base 68: mod_base = cm
  modified_base 78: mod_base = cm
  source 1..78: mol_type = other RNA

SEQ ID NO: 1267 - RNA, 124 nt, synthetic construct
  modified_base 1: mod_base = um
  modified_base 2: mod_base = OTHER; note = Phosphorothioate (PS) linkage
  modified_base 2: mod_base = um
  modified_base 3: mod_base = OTHER; note = Phosphorothioate (PS) linkage
  modified_base 3: mod_base = gm
  modified_base 4: mod_base = OTHER; note = Phosphorothioate (PS) linkage
  modified_base 29: mod_base = gm
  modified_base 30: mod_base = cm
  modified_base 31: mod_base = um
  modified_base 32: mod_base = OTHER; note = 2'-O-methyladenosine
  modified_base 33: mod_base = gm
  modified_base 34: mod_base = OTHER; note = 2'-O-methyladenosine
  modified_base 35: mod_base = OTHER; note = 2'-O-methyladenosine
  modified_base 36: mod_base = OTHER; note = 2'-O-methyladenosine
  modified_base 37: mod_base = um
  modified_base 38: mod_base = OTHER; note = 2'-O-methyladenosine
  modified_base 39: mod_base = gm
  modified_base 40: mod_base = cm
  modified_base 68: mod_base = OTHER; note = 2'-O-methyladenosine
  modified_base 69: mod_base = OTHER; note = 2'-O-methyladenosine
  modified_base 70: mod_base = cm
  modified_base 71: mod_base = um
  modified_base 72: mod_base = um
  modified_base 73: mod_base = gm
  modified_base 74: mod_base = OTHER; note = 2'-O-methyladenosine
  modified_base 75: mod_base = OTHER; note = 2'-O-methyladenosine
  modified_base 76: mod_base = OTHER; note = 2'-O-methyladenosine
  modified_base 77: mod_base = OTHER; note = 2'-O-methyladenosine
  modified_base 78: mod_base = OTHER; note = 2'-O-methyladenosine
  modified_base 79: mod_base = gm
  modified_base 80: mod_base = um
  modified_base 81: mod_base = gm
  modified_base 82: mod_base = gm
  modified_base 83: mod_base = cm
  modified_base 84: mod_base = OTHER; note = 2'-O-methyladenosine
  modified_base 85: mod_base = cm
  modified_base 86: mod_base = cm
  modified_base 87: mod_base = gm
  modified_base 88: mod_base = OTHER; note = 2'-O-methyladenosine
  modified_base 89: mod_base = gm
  modified_base 90: mod_base = um
  modified_base 91: mod_base = cm
  modified_base 92: mod_base = gm
  modified_base 93: mod_base = gm
  modified_base 94: mod_base = um
  modified_base 95: mod_base = gm
  modified_base 96: mod_base = cm
  modified_base 121: mod_base = um
  modified_base 122: mod_base = OTHER; note = Phosphorothioate (PS) linkage
  modified_base 122: mod_base = um
  modified_base 123: mod_base = OTHER; note = Phosphorothioate (PS) linkage
  modified_base 123: mod_base = um
  modified_base 124: mod_base = OTHER; note = Phosphorothioate (PS) linkage
  modified_base 124: mod_base = um
  source 1..124: mol_type = other RNA
ttggtgactgccacgcccaagttttagagctagaaatagcaagttaaaataaggctagtccgttatcaacttgaaaaagtggcaccgagtcggtgcagtgaacccccttgggcgtggcagtttt

SEQ ID NO: 1268 - RNA, 100 nt, synthetic construct
  modified_base 1: mod_base = gm
  modified_base 2: mod_base = OTHER; note = Phosphorothioate (PS) linkage
  modified_base 2: mod_base = gm
  modified_base 3: mod_base = OTHER; note = Phosphorothioate (PS) linkage
  modified_base 3: mod_base = cm
  modified_base 4: mod_base = OTHER; note = Phosphorothioate (PS) linkage
  modified_base 29: mod_base = gm
  modified_base 30: mod_base = cm
  modified_base 31: mod_base = um
  modified_base 32: mod_base = OTHER; note = 2'-O-methyladenosine
  modified_base 33: mod_base = gm
  modified_base 34: mod_base = OTHER; note = 2'-O-methyladenosine
  modified_base 35: mod_base = OTHER; note = 2'-O-methyladenosine
  modified_base 36: mod_base = OTHER; note = 2'-O-methyladenosine
  modified_base 37: mod_base = um
  modified_base 38: mod_base = OTHER; note = 2'-O-methyladenosine
  modified_base 39: mod_base = gm
  modified_base 40: mod_base = cm
  modified_base 68: mod_base = OTHER; note = 2'-O-methyladenosine
  modified_base 69: mod_base = OTHER; note = 2'-O-methyladenosine
  modified_base 70: mod_base = cm
  modified_base 71: mod_base = um
  modified_base 72: mod_base = um
  modified_base 73: mod_base = gm
  modified_base 74: mod_base = OTHER; note = 2'-O-methyladenosine
  modified_base 75: mod_base = OTHER; note = 2'-O-methyladenosine
  modified_base 76: mod_base = OTHER; note = 2'-O-methyladenosine
  modified_base 77: mod_base = OTHER; note = 2'-O-methyladenosine
  modified_base 78: mod_base = OTHER; note = 2'-O-methyladenosine
  modified_base 79: mod_base = gm
  modified_base 80: mod_base = um
  modified_base 81: mod_base = gm
  modified_base 82: mod_base = gm
  modified_base 83: mod_base = cm
  modified_base 84: mod_base = OTHER; note = 2'-O-methyladenosine
  modified_base 85: mod_base = cm
  modified_base 86: mod_base = cm
  modified_base 87: mod_base = gm
  modified_base 88: mod_base = OTHER; note = 2'-O-methyladenosine
  modified_base 89: mod_base = gm
  modified_base 90: mod_base = um
  modified_base 91: mod_base = cm
  modified_base 92: mod_base = gm
  modified_base 93: mod_base = gm
  modified_base 94: mod_base = um
  modified_base 95: mod_base = gm
  modified_base 96: mod_base = cm
  modified_base 97: mod_base = um
  modified_base 98: mod_base = OTHER; note = Phosphorothioate (PS) linkage
  modified_base 98: mod_base = um
  modified_base 99: mod_base = OTHER; note = Phosphorothioate (PS) linkage
  modified_base 99: mod_base = um
  modified_base 100: mod_base = OTHER; note = Phosphorothioate (PS) linkage
  modified_base 100: mod_base = um
  source 1..100: mol_type = other RNA
ggccagcagtgaacccccctgttttagagctagaaatagcaagttaaaataaggctagtccgttatcaacttgaaaaagtggcaccgagtcggtgctttt

SEQ ID NO: 1269 - RNA, 88 nt, synthetic construct
  modified_base 1: mod_base = OTHER; note = 2'-O-methyladenosine
  modified_base 2: mod_base = OTHER; note = Phosphorothioate (PS) linkage
  modified_base 2: mod_base = um
  modified_base 3: mod_base = OTHER; note = Phosphorothioate (PS) linkage
  modified_base 3: mod_base = OTHER; note = 2'-O-methyladenosine
  modified_base 4: mod_base = OTHER; note = Phosphorothioate (PS) linkage
  modified_base 27: mod_base = um
  modified_base 28: mod_base = um
  modified_base 29: mod_base = gm
  modified_base 30: mod_base = um
  modified_base 31: mod_base = OTHER; note = 2'-O-methyladenosine
  modified_base 34: mod_base = cm
  modified_base 35: mod_base = cm
  modified_base 36: mod_base = gm
  modified_base 37: mod_base = OTHER; note = 2'-O-methyladenosine
  modified_base 38: mod_base = OTHER; note = 2'-O-methyladenosine
  modified_base 39: mod_base = OTHER; note = 2'-O-methyladenosine
  modified_base 40: mod_base = gm
  modified_base 41: mod_base = gm
  modified_base 42: mod_base = OTHER; note = 2'-O-methyladenosine
  modified_base 43: mod_base = OTHER; note = 2'-O-methyladenosine
  modified_base 51: mod_base = OTHER; note = 2'-O-methyladenosine
  modified_base 59: mod_base = cm
  modified_base 60: mod_base = um
  modified_base 62: mod_base = cm
  modified_base 72: mod_base = um
  modified_base 74: mod_base = OTHER; note = 2'-O-methyladenosine
  modified_base 75: mod_base = um
  modified_base 83: mod_base = OTHER; note = 2' fluoro modified base
  modified_base 86: mod_base = OTHER; note = Phosphorothioate (PS) linkage
  modified_base 86: mod_base = gm
  modified_base 87: mod_base = OTHER; note = Phosphorothioate (PS) linkage
  modified_base 87: mod_base = um
  modified_base 88: mod_base = OTHER; note = Phosphorothioate (PS) linkage
  modified_base 88: mod_base = cm
  source 1..88: mol_type = other RNA
ataaggctgtgctgaccatcgagtttttgtactccgaaaggaagctacaaagataaggcttcatgccgaaatcatctcgtcgatggtc

SEQ ID NO: 1270 - DNA, 23 bp, synthetic construct
  source 1..23: mol_type = other DNA
cataaggctgtgctgaccatcga

SEQ ID NO: 1271 - DNA, 22 bp, synthetic construct
  source 1..22: mol_type = other DNA
ataaggctgtgctgaccatcga

SEQ ID NO: 1272 - DNA, 21 bp, synthetic construct
  source 1..21: mol_type = other DNA
taaggctgtgctgaccatcga

SEQ ID NO: 1273 - RNA, 23 nt, synthetic construct
  source 1..23: mol_type = other RNA
cataaggctgtgctgaccatcga

SEQ ID NO: 1274 - RNA, 22 nt, synthetic construct
  source 1..22: mol_type = other RNA
ataaggctgtgctgaccatcga

SEQ ID NO: 1275 - RNA, 21 nt, synthetic construct
  source 1..21: mol_type = other RNA
taaggctgtgctgaccatcga

SEQ ID NO: 1276 - protein, 1973 aa, synthetic construct
MKRTADGSEFESPKKKRKVSDLVLGLDIGIGSVGVGILNKVTGEIIHKNSRIFPAAQAENNVERRINRQGRRLTRRKKHRRVRLNHLFEESGLITDFTNVSINLNPYQLRVKGLTDELSNEELFIALKNMVKHRGISYLDDASDDGNSSVGDYAQIVKENSKQLETKTPGQIQLERYQKYGQLRGDFTVEEDGKKHRLINVFPTSAYRAEALRILQTQQEFNPQITDEFINSYLQILTGKRKYYHGPGNEKSRTDYGRYTTKKDSEDEYITLDNIFGILIGKCTFYPEEYRAAKASYTAQEFNLLNDLNNLTVPTETKKLSEEQKNQIITNVKNEKAMGPAKLFKYIAKLLSCDVADIKGYRIDKSDKAEIHTFEAYRKMKTLATIDIEQMERENLDKLAYVLTLNTEKEGIQEALEHEFADGTFSQEQIDELVQFRKANSSIFGKGWHSFSVKLMMELIPELYATSEEQMTILTRLGKQKTTSSSNKTKYIDEKQLTEEIYNPVAAKSVRQAIKIVNAAIKEYGDFDNIVIEMARETNEDDEKKAIQKIQKANKDEKDAAMLKAANQYNGKAELPHSVFHGHKQLATKIRLWHQQGERCLYTGKTISIHDLINNSNQFEIDHILPLSITFDDSLANKVLVYATAAQEKGQRTPYQALDSMDDAWSFRELKAFVRDSKALSNKKKEYLLTEEDISKFDVRKKFIERNLVDTRYASRVVLNALQEHFRVHKTDTKVSVVRGQFTSQLRRHWGIEKTRDTYHHHAVDALIIAASSQLNLWKKQKNTLVSYSEDQLLDIETGELISDDEYKESVFKAPYQHFVDTLKSKEFEDSILFSYQVDSKFNRKISDATIYATRQAKVGKDKKDETYVLGKIKDIYSQTGYDAFIKIYKKDKSKFLMYRHDPQTFEKVIEPILENYPNKELNEGGGGSGGGGSVTVKFKYKGEELEVDISKIKKVWRVGKMISFTYDDNGKTGRGAVSEKDAPKELLQMLEKSGKKGGGGSGGGGSKGKEVPCNPFLKYKEDHGYIRKYSKKGNGPEIKSLKYYDSKLGNHIDITPKNSNNKVVLQSVSPWRADVYFNKTTGKYEILGLKYADLKFEKGTGTYKISEEKYNDIKIKEGVDSDSEFKFTLYKNDLLLIKDTETKEQQLFRFLSRTMPNVKHYVELKPYDKQKFDDNEELIKILGIVAKGGQCKKGVSKPNISIYKIRTDVLGNQHIIKNEGDKPKLDFSGGSSGGSKRTADGSEFESPKKKRKVSGGSSGGSTLNIEDEYRLHETSKEPDVSLGSTWLSDFPQAWAETGGMGLAVRQAPLIIPLKATSTPVSIKQYPMSQEARLGIKPHIQRLLDQGILVPCQSPWNTPLLPVKKPGTNDYRPVQDLREVNKRVEDIHPTVPNPYNLLSGLPPSHQWYTVLDLKDAFFCLRLHPTSQPLFAFEWRDPEMGISGQLTWTRLPQGFKNSPTLFNEALHRDLADFRIQHPDLILLQYVDDLLLAATSELDCQQGTRALLQTLGNLGYRASAKKAQICQKQVKYLGYLLKEGQRWLTEARKETVMGQPTPKTPRQLREFLGKAGFCRLFIPGFAEMAAPLYPLTKPGTLFNWGPDQQKAYQEIKQALLTAPALGLPDLTKPFELFVDEKQGYAKGVLTQKLGPWRRPVAYLSKKLDPVAAGWPPCLRMVAAIAVLTKDAGKLTMGQPLVILAPHAVEALVKQPPDRWLSNARMTHYQALLLDTDRVQFGPVVALNPATLLPLPEEGLQHNCLDILAEAHGTRPDLTDQPLPDADHTWYTDGSSLLQEGQRKAGAAVTTETEVIWAKALPAGTSAQRAELIALTQALKMAEGKKLNVYTDSRYAFATAHIHGEIYRRRGWLTSEGKEIKNKDEILALLKALFLPKRLSIIHCPGHQKGHSAEARGNRMADQAARKAAITETPDTSTLLIENSSPSGGSKRTADGSEFESPKKKRKVGSGPAAKRVKLD

SEQ ID NO: 1277 - protein, 1973 aa, synthetic construct
MKRTADGSEFESPKKKRKVSDLVLGLDIGIGSVGVGILNKVTGEIIHKNSRIFPAAQAENNVERRINRQGRRLTRRKKHRRVRLNHLFEESGLITDFTNVSINLNPYQLRVKGLTDELSNEELFIALKNMVKHRGISYLDDASDDGNSSVGDYAQIVKENSKQLETKTPGQIQLERYQKYGQLRGDFTVEEDGKKHRLINVFPTSAYRAEALRILQTQQEFNPQITDEFINSYLQILTGKRKYYHGPGNEKSRTDYGRYTTKKDSEDEYITLDNIFGILIGKCTFYPEEYRAAKASYTAQEFNLLNDLNNLTVPTETKKLSEEQKNQIITNVKNEKAMGPAKLFKYIAKLLSCDVADIKGYRIDKSDKAEIHTFEAYRKMKTLATIDIEQMERENLDKLAYVLTLNTEKEGIQEALEHEFADGTFSQEQIDELVQFRKANSSIFGKGWHSFSVKLMMELIPELYATSEEQMTILTRLGKQKTTSSSNKTKYIDEKQLTEEIYNPVAAKSVRQAIKIVNAAIKEYGDFDNIVIEMARETNEDDEKKAIQKIQKANKDEKDAAMLKAANQYNGKAELPHSVFHGHKQLATKIRLWHQQGERCLYTGKTISIHDLINNSNQFEIDHILPLSITFDDSLANKVLVYATAAQEKGQRTPYQALDSMDDAWSFRELKAFVRDSKALSNKKKEYLLTEEDISKFDVRKKFIERNLVDTRYASRVVLNALQEHFRVHKTDTKVSVVRGQFTSQLRRHWGIEKTRDTYHHHAVDALIIAASSQLNLWKKQKNTLVSYSEDQLLDIETGELISDDEYKESVFKAPYQHFVDTLKSKEFEDSILFSYQVDSKFNRKISDATIYATRQAKVGKDKKDETYVLGKIKDIYSQTGYDAFIKIYKKDKSKFLMYRHDPQTFEKVIEPILENYPNKELNEGGGGSGGGGSVTVKFKYKGEEKEVDISKIKKVWRVGKMISFTYDLNGKTGRGAVSEKDAPKELLQMLEKSGKKGGGGSGGGGSKGKEVPCNPFLKYKEDHGYIRKYSKKGNGPEIKSLKYYDSKLGNHIDITPKNSNNKVVLQSVSPWRADVYFNKTTGKYEILGLKYADLKFEKGTGTYKISEEKYNDIKIKEGVDSDSEFKFTLYKNDLLLIKDTETKEQQLFRFLSRTMPNVKHYVELKPYDKQKFDDNEELIKILGIVAKGGQCKKGVSKPNISIYKIRTDVLGNQHIIKNEGDKPKLDFSGGSSGGSKRTADGSEFESPKKKRKVSGGSSGGSTLNIEDEYRLHETSKEPDVSLGSTWLSDFPQAWAETGGMGLAVRQAPLIIPLKATSTPVSIKQYPMSQEARLGIKPHIQRLLDQGILVPCQSPWNTPLLPVKKPGTNDYRPVQDLREVNKRVEDIHPTVPNPYNLLSGLPPSHQWYTVLDLKDAFFCLRLHPTSQPLFAFEWRDPEMGISGQLTWTRLPQGFKNSPTLFNEALHRDLADFRIQHPDLILLQYVDDLLLAATSELDCQQGTRALLQTLGNLGYRASAKKAQICQKQVKYLGYLLKEGQRWLTEARKETVMGQPTPKTPRQLREFLGKAGFCRLFIPGFAEMAAPLYPLTKPGTLFNWGPDQQKAYQEIKQALLTAPALGLPDLTKPFELFVDEKQGYAKGVLTQKLGPWRRPVAYLSKKLDPVAAGWPPCLRMVAAIAVLTKDAGKLTMGQPLVILAPHAVEALVKQPPDRWLSNARMTHYQALLLDTDRVQFGPVVALNPATLLPLPEEGLQHNCLDILAEAHGTRPDLTDQPLPDADHTWYTDGSSLLQEGQRKAGAAVTTETEVIWAKALPAGTSAQRAELIALTQALKMAEGKKLNVYTDSRYAFATAHIHGEIYRRRGWLTSEGKEIKNKDEILALLKALFLPKRLSIIHCPGHQKGHSAEARGNRMADQAARKAAITETPDTSTLLIENSSPSGGSKRTADGSEFESPKKKRKVGSGPAAKRVKLD

SEQ ID NO: 1278 - protein, 1953 aa, synthetic construct
MKRTADGSEFESPKKKRKVSDLVLGLDIGIGSVGVGILNKVTGEIIHKNSRIFPAAQAENNVERRINRQGRRLTRRKKHRRVRLNHLFEESGLITDFTNVSINLNPYQLRVKGLTDELSNEELFIALKNMVKHRGISYLDDASDDGNSSVGDYAQIVKENSKQLETKTPGQIQLERYQKYGQLRGDFTVEEDGKKHRLINVFPTSAYRAEALRILQTQQEFNPQITDEFINSYLQILTGKRKYYHGPGNEKSRTDYGRYTTKKDSEDEYITLDNIFGILIGKCTFYPEEYRAAKASYTAQEFNLLNDLNNLTVPTETKKLSEEQKNQIITNVKNEKAMGPAKLFKYIAKLLSCDVADIKGYRIDKSDKAEIHTFEAYRKMKTLATIDIEQMERENLDKLAYVLTLNTEKEGIQEALEHEFADGTFSQEQIDELVQFRKANSSIFGKGWHSFSVKLMMELIPELYATSEEQMTILTRLGKQKTTSSSNKTKYIDEKQLTEEIYNPVAAKSVRQAIKIVNAAIKEYGDFDNIVIEMARETNEDDEKKAIQKIQKANKDEKDAAMLKAANQYNGKAELPHSVFHGHKQLATKIRLWHQQGERCLYTGKTISIHDLINNSNQFEIDHILPLSITFDDSLANKVLVYATAAQEKGQRTPYQALDSMDDAWSFRELKAFVRDSKALSNKKKEYLLTEEDISKFDVRKKFIERNLVDTRYASRVVLNALQEHFRVHKTDTKVSVVRGQFTSQLRRHWGIEKTRDTYHHHAVDALIIAASSQLNLWKKQKNTLVSYSEDQLLDIETGELISDDEYKESVFKAPYQHFVDTLKSKEFEDSILFSYQVDSKFNRKISDATIYATRQAKVGKDKKDETYVLGKIKDIYSQTGYDAFIKIYKKDKSKFLMYRHDPQTFEKVIEPILENYPNKELNEVTVKFKYKGEELEVDISKIKKVWRVGKMISFTYDLNGKTGRGAVSEKDAPKELLQMLEKSGKKKGKEVPCNPFLKYKEDHGYIRKYSKKGNGPEIKSLKYYDSKLGNHIDITPKNSNNKVVLQSVSPWRADVYFNKTTGKYEILGLKYADLKFEKGTGTYKISEEKYNDIKIKEGVDSDSEFKFTLYKNDLLLIKDTETKEQQLFRFLSRTMPNVKHYVELKPYDKQKFDDNEELIKILGIVAKGGQCKKGVSKPNISIYKIRTDVLGNQHIIKNEGDKPKLDFSGGSSGGSKRTADGSEFESPKKKRKVSGGSSGGSTLNIEDEYRLHETSKEPDVSLGSTWLSDFPQAWAETGGMGLAVRQAPLIIPLKATSTPVSIKQYPMSQEARLGIKPHIQRLLDQGILVPCQSPWNTPLLPVKKPGTNDYRPVQDLREVNKRVEDIHPTVPNPYNLLSGLPPSHQWYTVLDLKDAFFCLRLHPTSQPLFAFEWRDPEMGISGQLTWTRLPQGFKNSPTLFNEALHRDLADFRIQHPDLILLQYVDDLLLAATSELDCQQGTRALLQTLGNLGYRASAKKAQICQKQVKYLGYLLKEGQRWLTEARKETVMGQPTPKTPRQLREFLGKAGFCRLFIPGFAEMAAPLYPLTKPGTLFNWGPDQQKAYQEIKQALLTAPALGLPDLTKPFELFVDEKQGYAKGVLTQKLGPWRRPVAYLSKKLDPVAAGWPPCLRMVAAIAVLTKDAGKLTMGQPLVILAPHAVEALVKQPPDRWLSNARMTHYQALLLDTDRVQFGPVVALNPATLLPLPEEGLQHNCLDILAEAHGTRPDLTDQPLPDADHTWYTDGSSLLQEGQRKAGAAVTTETEVIWAKALPAGTSAQRAELIALTQALKMAEGKKLNVYTDSRYAFATAHIHGEIYRRRGWLTSEGKEIKNKDEILALLKALFLPKRLSIIHCPGHQKGHSAEARGNRMADQAARKAAITETPDTSTLLIENSSPSGGSKRTADGSEFESPKKKRKVGSGPAAKRVKLD

SEQ ID NO: 1279 - protein, 1973 aa, synthetic construct
MKRTADGSEFESPKKKRKVSDLVLGLDIGIGSVGVGILNKVTGEIIHKNSRIFPAAQAENNVERRINRQGRRLTRRKKHRRVRLNHLFEESGLITDFTNVSINLNPYQLRVKGLTDELSNEELFIALKNMVKHRGISYLDDASDDGNSSVGDYAQIVKENSKQLETKTPGQIQLERYQKYGQLRGDFTVEEDGKKHRLINVFPTSAYRAEALRILQTQQEFNPQITDEFINSYLQILTGKRKYYHGPGNEKSRTDYGRYTTKKDSEDEYITLDNIFGILIGKCTFYPEEYRAAKASYTAQEFNLLNDLNNLTVPTETKKLSEEQKNQIITNVKNEKAMGPAKLFKYIAKLLSCDVADIKGYRIDKSDKAEIHTFEAYRKMKTLATIDIEQMERENLDKLAYVLTLNTEKEGIQEALEHEFADGTFSQEQIDELVQFRKANSSIFGKGWHSFSVKLMMELIPELYATSEEQMTILTRLGKQKTTSSSNKTKYIDEKQLTEEIYNPVAAKSVRQAIKIVNAAIKEYGDFDNIVIEMARETNEDDEKKAIQKIQKANKDEKDAAMLKAANQYNGKAELPHSVFHGHKQLATKIRLWHQQGERCLYTGKTISIHDLINNSNQFEIDHILPLSITFDDSLANKVLVYATAAQEKGQRTPYQALDSMDDAWSFRELKAFVRDSKALSNKKKEYLLTEEDISKFDVRKKFIERNLVDTRYASRVVLNALQEHFRVHKTDTKVSVVRGQFTSQLRRHWGIEKTRDTYHHHAVDALIIAASSQLNLWKKQKNTLVSYSEDQLLDIETGELISDDEYKESVFKAPYQHFVDTLKSKEFEDSILFSYQVDSKFNRKISDATIYATRQAKVGKDKKDETYVLGKIKDIYSQTGYDAFIKIYKKDKSKFLMYRHDPQTFEKVIEPILENYPNKELNEGGGGSGGGGSVTVKFKYKGEELEVDISKIKKVWRVGKMISFTYDLNGKTGRGAVSEKDAPKELLQMLEKSGKKGGGGSGGGGSKGKEVPCNPFLKYKEDHGYIRKYSKKGNGPEIKSLKYYDSKLGNHIDITPKNSNNKVVLQSVSPWRADVYFNKTTGKYEILGLKYADLKFEKGTGTYKISEEKYNDIKIKEGVDSDSEFKFTLYKNDLLLIKDTETKEQQLFRFLSRTMPNVKHYVELKPYDKQKFDDNEELIKILGIVAKGGQCKKGVSKPNISIYKIRTDVLGNQHIIKNEGDKPKLDFSGGSSGGSKRTADGSEFESPKKKRKVSGGSSGGSTLNIEDEYRLHETSKEPDVSLGSTWLSDFPQAWAETGGMGLAVRQAPLIIPLKATSTPVSIKQYPMSQEARLGIKPHIQRLLDQGILVPCQSPWNTPLLPVKKPGTNDYRPVQDLREVNKRVEDIHPTVPNPYNLLSGLPPSHQWYTVLDLKDAFFCLRLHPTSQPLFAFEWRDPEMGISGQLTWTRLPQGFKNSPTLFNEALHRDLADFRIQHPDLILLQYVDDLLLAATSELDCQQGTRALLQTLGNLGYRASAKKAQICQKQVKYLGYLLKEGQRWLTEARKETVMGQPTPKTPRQLREFLGKAGFCRLFIPGFAEMAAPLYPLTKPGTLFNWGPDQQKAYQEIKQALLTAPALGLPDLTKPFELFVDEKQGYAKGVLTQKLGPWRRPVAYLSKKLDPVAAGWPPCLRMVAAIAVLTKDAGKLTMGQPLVILAPHAVEALVKQPPDRWLSNARMTHYQALLLDTDRVQFGPVVALNPATLLPLPEEGLQHNCLDILAEAHGTRPDLTDQPLPDADHTWYTDGSSLLQEGQRKAGAAVTTETEVIWAKALPAGTSAQRAELIALTQALKMAEGKKLNVYTDSRYAFATAHIHGEIYRRRGWLTSEGKEIKNKDEILALLKALFLPKRLSIIHCPGHQKGHSAEARGNRMADQAARKAAITETPDTSTLLIENSSPSGGSKRTADGSEFESPKKKRKVGSGPAAKRVKLD

SEQ ID NO: 1280 - protein, 2019 aa, synthetic construct
MKRTADGSEFESPKKKRKVSDLVLGLDIGIGSVGVGILNKVTGEIIHKNSRIFPAAQAENNVERRINRQGRRLTRRKKHRRVRLNHLFEESGLITDFTNVSINLNPYQLRVKGLTDELSNEELFIALKNMVKHRGISYLDDASDDGNSSVGDYAQIVKENSKQLETKTPGQIQLERYQKYGQLRGDFTVEEDGKKHRLINVFPTSAYRAEALRILQTQQEFNPQITDEFINSYLQILTGKRKYYHGPGNEKSRTDYGRYTTKKDSEDEYITLDNIFGILIGKCTFYPEEYRAAKASYTAQEFNLLNDLNNLTVPTETKKLSEEQKNQIITNVKNEKAMGPAKLFKYIAKLLSCDVADIKGYRIDKSDKAEIHTFEAYRKMKTLATIDIEQMERENLDKLAYVLTLNTEKEGIQEALEHEFADGTFSQEQIDELVQFRKANSSIFGKGWHSFSVKLMMELIPELYATSEEQMTILTRLGKQKTTSSSNKTKYIDEKQLTEEIYNPVAAKSVRQAIKIVNAAIKEYGDFDNIVIEMARETNEDDEKKAIQKIQKANKDEKDAAMLKAANQYNGKAELPHSVFHGHKQLATKIRLWHQQGERCLYTGKTISIHDLINNSNQFEIDHILPLSITFDDSLANKVLVYATAAQEKGQRTPYQALDSMDDAWSFRELKAFVRDSKALSNKKKEYLLTEEDISKFDVRKKFIERNLVDTRYASRVVLNALQEHFRVHKTDTKVSVVRGQFTSQLRRHWGIEKTRDTYHHHAVDALIIAASSQLNLWKKQKNTLVSYSEDQLLDIETGELISDDEYKESVFKAPYQHFVDTLKSKEFEDSILFSYQVDSKFNRKISDATIYATRQAKVGKDKKDETYVLGKIKDIYSQTGYDAFIKIYKKDKSKFLMYRHDPQTFEKVIEPILENYPNKELNESGGSSGGSSGSETPGTSESATPESSGGSSGGSSVTVKFKYKGEELEVDISKIKKVWRVGKMISFTYDLNGKTGRGAVSEKDAPKELLQMLEKSGKKSGGSSGGSSGSETPGTSESATPESSGGSSGGSSKGKEVPCNPFLKYKEDHGYIRKYSKKGNGPEIKSLKYYDSKLGNHIDITPKNSNNKVVLQSVSPWRADVYFNKTTGKYEILGLKYADLKFEKGTGTYKISEEKYNDIKIKEGVDSDSEFKFTLYKNDLLLIKDTETKEQQLFRFLSRTMPNVKHYVELKPYDKQKFDDNEELIKILGIVAKGGQCKKGVSKPNISIYKIRTDVLGNQHIIKNEGDKPKLDFSGGSSGGSKRTADGSEFESPKKKRKVSGGSSGGSTLNIEDEYRLHETSKEPDVSLGSTWLSDFPQAWAETGGMGLAVRQAPLIIPLKATSTPVSIKQYPMSQEARLGIKPHIQRLLDQGILVPCQSPWNTPLLPVKKPGTNDYRPVQDLREVNKRVEDIHPTVPNPYNLLSGLPPSHQWYTVLDLKDAFFCLRLHPTSQPLFAFEWRDPEMGISGQLTWTRLPQGFKNSPTLFNEALHRDLADFRIQHPDLILLQYVDDLLLAATSELDCQQGTRALLQTLGNLGYRASAKKAQICQKQVKYLGYLLKEGQRWLTEARKETVMGQPTPKTPRQLREFLGKAGFCRLFIPGFAEMAAPLYPLTKPGTLFNWGPDQQKAYQEIKQALLTAPALGLPDLTKPFELFVDEKQGYAKGVLTQKLGPWRRPVAYLSKKLDPVAAGWPPCLRMVAAIAVLTKDAGKLTMGQPLVILAPHAVEALVKQPPDRWLSNARMTHYQALLLDTDRVQFGPVVALNPATLLPLPEEGLQHNCLDILAEAHGTRPDLTDQPLPDADHTWYTDGSSLLQEGQRKAGAAVTTETEVIWAKALPAGTSAQRAELIALTQALKMAEGKKLNVYTDSRYAFATAHIHGEIYRRRGWLTSEGKEIKNKDEILALLKALFLPKRLSIIHCPGHQKGHSAEARGNRMADQAARKAAITETPDTSTLLIENSSPSGGSKRTADGSEFESPKKKRKVGSGPAAKRVKLD

SEQ ID NO: 1281 - protein, 1910 aa, synthetic construct
MKRTADGSEFESPKKKRKVSDLVLGLDIGIGSVGVGILNKVTGEIIHKNSRIFPAAQAENNVERRINRQGRRLTRRKKHRRVRLNHLFEESGLITDFTNVSINLNPYQLRVKGLTDELSNEELFIALKNMVKHRGISYLDDASDDGNSSVGDYAQIVKENSKQLETKTPGQIQLERYQKYGQLRGDFTVEEDGKKHRLINVFPTSAYRAEALRILQTQQEFNPQITDEFINSYLQILTGKRKYYHGPGNEKSRTDYGRYTTKKDSEDEYITLDNIFGILIGKCTFYPEEYRAAKASYTAQEFNLLNDLNNLTVPTETKKLSEEQKNQIITNVKNEKAMGPAKLFKYIAKLLSCDVADIKGYRIDKSDKAEIHTFEAYRKMKTLATIDIEQMERENLDKLAYVLTLNTEKEGIQEALEHEFADGTFSQEQIDELVQFRKANSSIFGKGWHSFSVKLMMELIPELYATSEEQMTILTRLGKQKTTSSSNKTKYIDEKQLTEEIYNPVAAKSVRQAIKIVNAAIKEYGDFDNIVIEMARETNEDDEKKAIQKIQKANKDEKDAAMLKAANQYNGKAELPHSVFHGHKQLATKIRLWHQQGERCLYTGKTISIHDLINNSNQFEIDHILPLSITFDDSLANKVLVYATAAQEKGQRTPYQALDSMDDAWSFRELKAFVRDSKALSNKKKEYLLTEEDISKFDVRKKFIERNLVDTRYASRVVLNALQEHFRVHKTDTKVSVVRGQFTSQLRRHWGIEKTRDTYHHHAVDALIIAASSQLNLWKKQKNTLVSYSEDQLLDIETGELISDDEYKESVFKAPYQHFVDTLKSKEFEDSILFSYQVDSKFNRKISDATIYATRQAKVGKDKKDETYVLGKIKDIYSQTGYDAFIKIYKKDKSKFLMYRHDPQTFEKVIEPILENYPNKELNENQIRMKIGVMFGNPETTTGGKGKEVPCNPFLKYKEDHGYIRKYSKKGNGPEIKSLKYYDSKLGNHIDITPKNSNNKVVLQSVSPWRADVYFNKTTGKYEILGLKYADLKFEKGTGTYKISEEKYNDIKIKEGVDSDSEFKFTLYKNDLLLIKDTETKEQQLFRFLSRTMPNVKHYVELKPYDKQKFDDNEELIKILGIVAKGGQCKKGVSKPNISIYKIRTDVLGNQHIIKNEGDKPKLDFSGGSSGGSKRTADGSEFESPKKKRKVSGGSSGGSTLNIEDEYRLHETSKEPDVSLGSTWLSDFPQAWAETGGMGLAVRQAPLIIPLKATSTPVSIKQYPMSQEARLGIKPHIQRLLDQGILVPCQSPWNTPLLPVKKPGTNDYRPVQDLREVNKRVEDIHPTVPNPYNLLSGLPPSHQWYTVLDLKDAFFCLRLHPTSQPLFAFEWRDPEMGISGQLTWTRLPQGFKNSPTLFNEALHRDLADFRIQHPDLILLQYVDDLLLAATSELDCQQGTRALLQTLGNLGYRASAKKAQICQKQVKYLGYLLKEGQRWLTEARKETVMGQPTPKTPRQLREFLGKAGFCRLFIPGFAEMAAPLYPLTKPGTLFNWGPDQQKAYQEIKQALLTAPALGLPDLTKPFELFVDEKQGYAKGVLTQKLGPWRRPVAYLSKKLDPVAAGWPPCLRMVAAIAVLTKDAGKLTMGQPLVILAPHAVEALVKQPPDRWLSNARMTHYQALLLDTDRVQFGPVVALNPATLLPLPEEGLQHNCLDILAEAHGTRPDLTDQPLPDADHTWYTDGSSLLQEGQRKAGAAVTTETEVIWAKALPAGTSAQRAELIALTQALKMAEGKKLNVYTDSRYAFATAHIHGEIYRRRGWLTSEGKEIKNKDEILALLKALFLPKRLSIIHCPGHQKGHSAEARGNRMADQAARKAAITETPDTSTLLIENSSPSGGSKRTADGSEFESPKKKRKVGSGPAAKRVKLD

SEQ ID NO: 1282 - protein, 1930 aa, synthetic construct
MKRTADGSEFESPKKKRKVSDLVLGLDIGIGSVGVGILNKVTGEIIHKNSRIFPAAQAENNVERRINRQGRRLTRRKKHRRVRLNHLFEESGLITDFTNVSINLNPYQLRVKGLTDELSNEELFIALKNMVKHRGISYLDDASDDGNSSVGDYAQIVKENSKQLETKTPGQIQLERYQKYGQLRGDFTVEEDGKKHRLINVFPTSAYRAEALRILQTQQEFNPQITDEFINSYLQILTGKRKYYHGPGNEKSRTDYGRYTTKKDSEDEYITLDNIFGILIGKCTFYPEEYRAAKASYTAQEFNLLNDLNNLTVPTETKKLSEEQKNQIITNVKNEKAMGPAKLFKYIAKLLSCDVADIKGYRIDKSDKAEIHTFEAYRKMKTLATIDIEQMERENLDKLAYVLTLNTEKEGIQEALEHEFADGTFSQEQIDELVQFRKANSSIFGKGWHSFSVKLMMELIPELYATSEEQMTILTRLGKQKTTSSSNKTKYIDEKQLTEEIYNPVAAKSVRQAIKIVNAAIKEYGDFDNIVIEMARETNEDDEKKAIQKIQKANKDEKDAAMLKAANQYNGKAELPHSVFHGHKQLATKIRLWHQQGERCLYTGKTISIHDLINNSNQFEIDHILPLSITFDDSLANKVLVYATAAQEKGQRTPYQALDSMDDAWSFRELKAFVRDSKALSNKKKEYLLTEEDISKFDVRKKFIERNLVDTRYASRVVLNALQEHFRVHKTDTKVSVVRGQFTSQLRRHWGIEKTRDTYHHHAVDALIIAASSQLNLWKKQKNTLVSYSEDQLLDIETGELISDDEYKESVFKAPYQHFVDTLKSKEFEDSILFSYQVDSKFNRKISDATIYATRQAKVGKDKKDETYVLGKIKDIYSQTGYDAFIKIYKKDKSKFLMYRHDPQTFEKVIEPILENYPNKELNEGGGGSGGGGSNQIRMKIGVMFGNPETTTGGGGGGSGGGGSKGKEVPCNPFLKYKEDHGYIRKYSKKGNGPEIKSLKYYDSKLGNHIDITPKNSNNKVVLQSVSPWRADVYFNKTTGKYEILGLKYADLKFEKGTGTYKISEEKYNDIKIKEGVDSDSEFKFTLYKNDLLLIKDTETKEQQLFRFLSRTMPNVKHYVELKPYDKQKFDDNEELIKILGIVAKGGQCKKGVSKPNISIYKIRTDVLGNQHIIKNEGDKPKLDFSGGSSGGSKRTADGSEFESPKKKRKVSGGSSGGSTLNIEDEYRLHETSKEPDVSLGSTWLSDFPQAWAETGGMGLAVRQAPLIIPLKATSTPVSIKQYPMSQEARLGIKPHIQRLLDQGILVPCQSPWNTPLLPVKKPGTNDYRPVQDLREVNKRVEDIHPTVPNPYNLLSGLPPSHQWYTVLDLKDAFFCLRLHPTSQPLFAFEWRDPEMGISGQLTWTRLPQGFKNSPTLFNEALHRDLADFRIQHPDLILLQYVDDLLLAATSELDCQQGTRALLQTLGNLGYRASAKKAQICQKQVKYLGYLLKEGQRWLTEARKETVMGQPTPKTPRQLREFLGKAGFCRLFIPGFAEMAAPLYPLTKPGTLFNWGPDQQKAYQEIKQALLTAPALGLPDLTKPFELFVDEKQGYAKGVLTQKLGPWRRPVAYLSKKLDPVAAGWPPCLRMVAAIAVLTKDAGKLTMGQPLVILAPHAVEALVKQPPDRWLSNARMTHYQALLLDTDRVQFGPVVALNPATLLPLPEEGLQHNCLDILAEAHGTRPDLTDQPLPDADHTWYTDGSSLLQEGQRKAGAAVTTETEVIWAKALPAGTSAQRAELIALTQALKMAEGKKLNVYTDSRYAFATAHIHGEIYRRRGWLTSEGKEIKNKDEILALLKALFLPKRLSIIHCPGHQKGHSAEARGNRMADQAARKAAITETPDTSTLLIENSSPSGGSKRTADGSEFESPKKKRKVGSGPAAKRVKLD

SEQ ID NO: 1283 - protein, 1976 aa, synthetic construct
MKRTADGSEFESPKKKRKVSDLVLGLDIGIGSVGVGILNKVTGEIIHKNSRIFPAAQAENNVERRINRQGRRLTRRKKHRRVRLNHLFEESGLITDFTNVSINLNPYQLRVKGLTDELSNEELFIALKNMVKHRGISYLDDASDDGNSSVGDYAQIVKENSKQLETKTPGQIQLERYQKYGQLRGDFTVEEDGKKHRLINVFPTSAYRAEALRILQTQQEFNPQITDEFINSYLQILTGKRKYYHGPGNEKSRTDYGRYTTKKDSEDEYITLDNIFGILIGKCTFYPEEYRAAKASYTAQEFNLLNDLNNLTVPTETKKLSEEQKNQIITNVKNEKAMGPAKLFKYIAKLLSCDVADIKGYRIDKSDKAEIHTFEAYRKMKTLATIDIEQMERENLDKLAYVLTLNTEKEGIQEALEHEFADGTFSQEQIDELVQFRKANSSIFGKGWHSFSVKLMMELIPELYATSEEQMTILTRLGKQKTTSSSNKTKYIDEKQLTEEIYNPVAAKSVRQAIKIVNAAIKEYGDFDNIVIEMARETNEDDEKKAIQKIQKANKDEKDAAMLKAANQYNGKAELPHSVFHGHKQLATKIRLWHQQGERCLYTGKTISIHDLINNSNQFEIDHILPLSITFDDSLANKVLVYATAAQEKGQRTPYQALDSMDDAWSFRELKAFVRDSKALSNKKKEYLLTEEDISKFDVRKKFIERNLVDTRYASRVVLNALQEHFRVHKTDTKVSVVRGQFTSQLRRHWGIEKTRDTYHHHAVDALIIAASSQLNLWKKQKNTLVSYSEDQLLDIETGELISDDEYKESVFKAPYQHFVDTLKSKEFEDSILFSYQVDSKFNRKISDATIYATRQAKVGKDKKDETYVLGKIKDIYSQTGYDAFIKIYKKDKSKFLMYRHDPQTFEKVIEPILENYPNKELNESGGSSGGSSGSETPGTSESATPESSGGSSGGSSNQIRMKIGVMFGNPETTTGGSGGSSGGSSGSETPGTSESATPESSGGSSGGSSKGKEVPCNPFLKYKEDHGYIRKYSKKGNGPEIKSLKYYDSKLGNHIDITPKNSNNKVVLQSVSPWRADVYFNKTTGKYEILGLKYADLKFEKGTGTYKISEEKYNDIKIKEGVDSDSEFKFTLYKNDLLLIKDTETKEQQLFRFLSRTMPNVKHYVELKPYDKQKFDDNEELIKILGIVAKGGQCKKGVSKPNISIYKIRTDVLGNQHIIKNEGDKPKLDFSGGSSGGSKRTADGSEFESPKKKRKVSGGSSGGSTLNIEDEYRLHETSKEPDVSLGSTWLSDFPQAWAETGGMGLAVRQAPLIIPLKATSTPVSIKQYPMSQEARLGIKPHIQRLLDQGILVPCQSPWNTPLLPVKKPGTNDYRPVQDLREVNKRVEDIHPTVPNPYNLLSGLPPSHQWYTVLDLKDAFFCLRLHPTSQPLFAFEWRDPEMGISGQLTWTRLPQGFKNSPTLFNEALHRDLADFRIQHPDLILLQYVDDLLLAATSELDCQQGTRALLQTLGNLGYRASAKKAQICQKQVKYLGYLLKEGQRWLTEARKETVMGQPTPKTPRQLREFLGKAGFCRLFIPGFAEMAAPLYPLTKPGTLFNWGPDQQKAYQEIKQALLTAPALGLPDLTKPFELFVDEKQGYAKGVLTQKLGPWRRPVAYLSKKLDPVAAGWPPCLRMVAAIAVLTKDAGKLTMGQPLVILAPHAVEALVKQPPDRWLSNARMTHYQALLLDTDRVQFGPVVALNPATLLPLPEEGLQHNCLDILAEAHGTRPDLTDQPLPDADHTWYTDGSSLLQEGQRKAGAAVTTETEVIWAKALPAGTSAQRAELIALTQALKMAEGKKLNVYTDSRYAFATAHIHGEIYRRRGWLTSEGKEIKNKDEILALLKALFLPKRLSIIHCPGHQKGHSAEARGNRMADQAARKAAITETPDTSTLLIENSSPSGGSKRTADGSEFESPKKKRKVGSGPAAKRVKLD

SEQ ID NO: 1284 - protein, 1953 aa, synthetic construct
MVTVKFKYKGEELEVDISKIKKVWRVGKMISFTYDLNGKTGRGAVSEKDAPKELLQMLEKSGKKKRTADGSEFESPKKKRKVSDLVLGLDIGIGSVGVGILNKVTGEIIHKNSRIFPAAQAENNVERRINRQGRRLTRRKKHRRVRLNHLFEESGLITDFTNVSINLNPYQLRVKGLTDELSNEELFIALKNMVKHRGISYLDDASDDGNSSVGDYAQIVKENSKQLETKTPGQIQLERYQKYGQLRGDFTVEEDGKKHRLINVFPTSAYRAEALRILQTQQEFNPQITDEFINSYLQILTGKRKYYHGPGNEKSRTDYGRYTTKKDSEDEYITLDNIFGILIGKCTFYPEEYRAAKASYTAQEFNLLNDLNNLTVPTETKKLSEEQKNQIITNVKNEKAMGPAKLFKYIAKLLSCDVADIKGYRIDKSDKAEIHTFEAYRKMKTLATIDIEQMERENLDKLAYVLTLNTEKEGIQEALEHEFADGTFSQEQIDELVQFRKANSSIFGKGWHSFSVKLMMELIPELYATSEEQMTILTRLGKQKTTSSSNKTKYIDEKQLTEEIYNPVAAKSVRQAIKIVNAAIKEYGDFDNIVIEMARETNEDDEKKAIQKIQKANKDEKDAAMLKAANQYNGKAELPHSVFHGHKQLATKIRLWHQQGERCLYTGKTISIHDLINNSNQFEIDHILPLSITFDDSLANKVLVYATAAQEKGQRTPYQALDSMDDAWSFRELKAFVRDSKALSNKKKEYLLTEEDISKFDVRKKFIERNLVDTRYASRVVLNALQEHFRVHKTDTKVSVVRGQFTSQLRRHWGIEKTRDTYHHHAVDALIIAASSQLNLWKKQKNTLVSYSEDQLLDIETGELISDDEYKESVFKAPYQHFVDTLKSKEFEDSILFSYQVDSKFNRKISDATIYATRQAKVGKDKKDETYVLGKIKDIYSQTGYDAFIKIYKKDKSKFLMYRHDPQTFEKVIEPILENYPNKELNEKGKEVPCNPFLKYKEDHGYIRKYSKKGNGPEIKSLKYYDSKLGNHIDITPKNSNNKVVLQSVSPWRADVYFNKTTGKYEILGLKYADLKFEKGTGTYKISEEKYNDIKIKEGVDSDSEFKFTLYKNDLLLIKDTETKEQQLFRFLSRTMPNVKHYVELKPYDKQKFDDNEELIKILGIVAKGGQCKKGVSKPNISIYKIRTDVLGNQHIIKNEGDKPKLDFSGGSSGGSKRTADGSEFESPKKKRKVSGGSSGGSTLNIEDEYRLHETSKEPDVSLGSTWLSDFPQAWAETGGMGLAVRQAPLIIPLKATSTPVSIKQYPMSQEARLGIKPHIQRLLDQGILVPCQSPWNTPLLPVKKPGTNDYRPVQDLREVNKRVEDIHPTVPNPYNLLSGLPPSHQWYTVLDLKDAFFCLRLHPTSQPLFAFEWRDPEMGISGQLTWTRLPQGFKNSPTLFNEALHRDLADFRIQHPDLILLQYVDDLLLAATSELDCQQGTRALLQTLGNLGYRASAKKAQICQKQVKYLGYLLKEGQRWLTEARKETVMGQPTPKTPRQLREFLGKAGFCRLFIPGFAEMAAPLYPLTKPGTLFNWGPDQQKAYQEIKQALLTAPALGLPDLTKPFELFVDEKQGYAKGVLTQKLGPWRRPVAYLSKKLDPVAAGWPPCLRMVAAIAVLTKDAGKLTMGQPLVILAPHAVEALVKQPPDRWLSNARMTHYQALLLDTDRVQFGPVVALNPATLLPLPEEGLQHNCLDILAEAHGTRPDLTDQPLPDADHTWYTDGSSLLQEGQRKAGAAVTTETEVIWAKALPAGTSAQRAELIALTQALKMAEGKKLNVYTDSRYAFATAHIHGEIYRRRGWLTSEGKEIKNKDEILALLKALFLPKRLSIIHCPGHQKGHSAEARGNRMADQAARKAAITETPDTSTLLIENSSPSGGSKRTADGSEFESPKKKRKVGSGPAAKRVKLD

SEQ ID NO: 1285 - protein, 1910 aa, synthetic construct
MNQIRMKIGVMFGNPETTTGGKRTADGSEFESPKKKRKVSDLVLGLDIGIGSVGVGILNKVTGEIIHKNSRIFPAAQAENNVERRINRQGRRLTRRKKHRRVRLNHLFEESGLITDFTNVSINLNPYQLRVKGLTDELSNEELFIALKNMVKHRGISYLDDASDDGNSSVGDYAQIVKENSKQLETKTPGQIQLERYQKYGQLRGDFTVEEDGKKHRLINVFPTSAYRAEALRILQTQQEFNPQITDEFINSYLQILTGKRKYYHGPGNEKSRTDYGRYTTKKDSEDEYITLDNIFGILIGKCTFYPEEYRAAKASYTAQEFNLLNDLNNLTVPTETKKLSEEQKNQIITNVKNEKAMGPAKLFKYIAKLLSCDVADIKGYRIDKSDKAEIHTFEAYRKMKTLATIDIEQMERENLDKLAYVLTLNTEKEGIQEALEHEFADGTFSQEQIDELVQFRKANSSIFGKGWHSFSVKLMMELIPELYATSEEQMTILTRLGKQKTTSSSNKTKYIDEKQLTEEIYNPVAAKSVRQAIKIVNAAIKEYGDFDNIVIEMARETNEDDEKKAIQKIQKANKDEKDAAMLKAANQYNGKAELPHSVFHGHKQLATKIRLWHQQGERCLYTGKTISIHDLINNSNQFEIDHILPLSITFDDSLANKVLVYATAAQEKGQRTPYQALDSMDDAWSFRELKAFVRDSKALSNKKKEYLLTEEDISKFDVRKKFIERNLVDTRYASRVVLNALQEHFRVHKTDTKVSVVRGQFTSQLRRHWGIEKTRDTYHHHAVDALIIAASSQLNLWKKQKNTLVSYSEDQLLDIETGELISDDEYKESVFKAPYQHFVDTLKSKEFEDSILFSYQVDSKFNRKISDATIYATRQAKVGKDKKDETYVLGKIKDIYSQTGYDAFIKIYKKDKSKFLMYRHDPQTFEKVIEPILENYPNKELNEKGKEVPCNPFLKYKEDHGYIRKYSKKGNGPEIKSLKYYDSKLGNHIDITPKNSNNKVVLQSVSPWRADVYFNKTTGKYEILGLKYADLKFEKGTGTYKISEEKYNDIKIKEGVDSDSEFKFTLYKNDLLLIKDTETKEQQLFRFLSRTMPNVKHYVELKPYDKQKFDDNEELIKILGIVAKGGQCKKGVSKPNISIYKIRTDVLGNQHIIKNEGDKPKLDFSGGSSGGSKRTADGSEFESPKKKRKVSGGSSGGSTLNIEDEYRLHETSKEPDVSLGSTWLSDFPQAWAETGGMGLAVRQAPLIIPLKATSTPVSIKQYPMSQEARLGIKPHIQRLLDQGILVPCQSPWNTPLLPVKKPGTNDYRPVQDLREVNKRVEDIHPTVPNPYNLLSGLPPSHQWYTVLDLKDAFFCLRLHPTSQPLFAFEWRDPEMGISGQLTWTRLPQGFKNSPTLFNEALHRDLADFRIQHPDLILLQYVDDLLLAATSELDCQQGTRALLQTLGNLGYRASAKKAQICQKQVKYLGYLLKEGQRWLTEARKETVMGQPTPKTPRQLREFLGKAGFCRLFIPGFAEMAAPLYPLTKPGTLFNWGPDQQKAYQEIKQALLTAPALGLPDLTKPFELFVDEKQGYAKGVLTQKLGPWRRPVAYLSKKLDPVAAGWPPCLRMVAAIAVLTKDAGKLTMGQPLVILAPHAVEALVKQPPDRWLSNARMTHYQALLLDTDRVQFGPVVALNPATLLPLPEEGLQHNCLDILAEAHGTRPDLTDQPLPDADHTWYTDGSSLLQEGQRKAGAAVTTETEVIWAKALPAGTSAQRAELIALTQALKMAEGKKLNVYTDSRYAFATAHIHGEIYRRRGWLTSEGKEIKNKDEILALLKALFLPKRLSIIHCPGHQKGHSAEARGNRMADQAARKAAITETPDTSTLLIENSSPSGGSKRTADGSEFESPKKKRKVGSGPAAKRVKLD

SEQ ID NO: 1286 - protein, 1953 aa, synthetic construct
MKRTADGSEFESPKKKRKVSDLVLGLDIGIGSVGVGILNKVTGEIIHKNSRIFPAAQAENNVERRINRQGRRLTRRKKHRRVRLNHLFEESGLITDFTNVSINLNPYQLRVKGLTDELSNEELFIALKNMVKHRGISYLDDASDDGNSSVGDYAQIVKENSKQLETKTPGQIQLERYQKYGQLRGDFTVEEDGKKHRLINVFPTSAYRAEALRILQTQQEFNPQITDEFINSYLQILTGKRKYYHGPGNEKSRTDYGRYTTKKDSEDEYITLDNIFGILIGKCTFYPEEYRAAKASYTAQEFNLLNDLNNLTVPTETKKLSEEQKNQIITNVKNEKAMGPAKLFKYIAKLLSCDVADIKGYRIDKSDKAEIHTFEAYRKMKTLATIDIEQMERENLDKLAYVLTLNTEKEGIQEALEHEFADGTFSQEQIDELVQFRKANSSIFGKGWHSFSVKLMMELIPELYATSEEQMTILTRLGKQKTTSSSNKTKYIDEKQLTEEIYNPVAAKSVRQAIKIVNAAIKEYGDFDNIVIEMARETNEDDEKKAIQKIQKANKDEKDAAMLKAANQYNGKAELPHSVFHGHKQLATKIRLWHQQGERCLYTGKTISIHDLINNSNQFEIDHILPLSITFDDSLANKVLVYATAAQEKGQRTPYQALDSMDDAWSFRELKAFVRDSKALSNKKKEYLLTEEDISKFDVRKKFIERNLVDTRYASRVVLNALQEHFRVHKTDTKVSVVRGQFTSQLRRHWGIEKTRDTYHHHAVDALIIAASSQLNLWKKQKNTLVSYSEDQLLDIETGELISDDEYKESVFKAPYQHFVDTLKSKEFEDSILFSYQVDSKFNRKISDATIYATRQAKVGKDKKDETYVLGKIKDIYSQTGYDAFIKIYKKDKSKFLMYRHDPQTFEKVIEPILENYPNKELNEKGKEVPCNPFLKYKEDHGYIRKYSKKGNGPEIKSLKYYDSKLGNHIDITPKNSNNKVVLQSVSPWRADVYFNKTTGKYEILGLKYADLKFEKGTGTYKISEEKYNDIKIKEGVDSDSEFKFTLYKNDLLLIKDTETKEQQLFRFLSRTMPNVKHYVELKPYDKQKFDDNEELIKILGIVAKGGQCKKGVSKPNISIYKIRTDVLGNQHIIKNEGDKPKLDFSGGSSGGSKRTADGSEFESPKKKRKVSGGSSGGSTLNIEDEYRLHETSKEPDVSLGSTWLSDFPQAWAETGGMGLAVRQAPLIIPLKATSTPVSIKQYPMSQEARLGIKPHIQRLLDQGILVPCQSPWNTPLLPVKKPGTNDYRPVQDLREVNKRVEDIHPTVPNPYNLLSGLPPSHQWYTVLDLKDAFFCLRLHPTSQPLFAFEWRDPEMGISGQLTWTRLPQGFKNSPTLFNEALHRDLADFRIQHPDLILLQYVDDLLLAATSELDCQQGTRALLQTLGNLGYRASAKKAQICQKQVKYLGYLLKEGQRWLTEARKETVMGQPTPKTPRQLREFLGKAGFCRLFIPGFAEMAAPLYPLTKPGTLFNWGPDQQKAYQEIKQALLTAPALGLPDLTKPFELFVDEKQGYAKGVLTQKLGPWRRPVAYLSKKLDPVAAGWPPCLRMVAAIAVLTKDAGKLTMGQPLVILAPHAVEALVKQPPDRWLSNARMTHYQALLLDTDRVQFGPVVALNPATLLPLPEEGLQHNCLDILAEAHGTRPDLTDQPLPDADHTWYTDGSSLLQEGQRKAGAAVTTETEVIWAKALPAGTSAQRAELIALTQALKMAEGKKLNVYTDSRYAFATAHIHGEIYRRRGWLTSEGKEIKNKDEILALLKALFLPKRLSIIHCPGHQKGHSAEARGNRMADQAARKAAITETPDTSTLLIENSSPSGGSKRTADGSEFESPKKKRKVGSGPAAKRVKLDVTVKFKYKGEELEVDISKIKKVWRVGKMISFTYDLNGKTGRGAVSEKDAPKELLQMLEKSGKK

SEQ ID NO: 1287 - protein, 1910 aa, synthetic construct
MKRTADGSEFESPKKKRKVSDLVLGLDIGIGSVGVGILNKVTGEIIHKNSRIFPAAQAENNVERRINRQGRRLTRRKKHRRVRLNHLFEESGLITDFTNVSINLNPYQLRVKGLTDELSNEELFIALKNMVKHRGISYLDDASDDGNSSVGDYAQIVKENSKQLETKTPGQIQLERYQKYGQLRGDFTVEEDGKKHRLINVFPTSAYRAEALRILQTQQEFNPQITDEFINSYLQILTGKRKYYHGPGNEKSRTDYGRYTTKKDSEDEYITLDNIFGILIGKCTFYPEEYRAAKASYTAQEFNLLNDLNNLTVPTETKKLSEEQKNQIITNVKNEKAMGPAKLFKYIAKLLSCDVADIKGYRIDKSDKAEIHTFEAYRKMKTLATIDIEQMERENLDKLAYVLTLNTEKEGIQEALEHEFADGTFSQEQIDELVQFRKANSSIFGKGWHSFSVKLMMELIPELYATSEEQMTILTRLGKQKTTSSSNKTKYIDEKQLTEEIYNPVAAKSVRQAIKIVNAAIKEYGDFDNIVIEMARETNEDDEKKAIQKIQKANKDEKDAAMLKAANQYNGKAELPHSVFHGHKQLATKIRLWHQQGERCLYTGKTISIHDLINNSNQFEIDHILPLSITFDDSLANKVLVYATAAQEKGQRTPYQALDSMDDAWSFRELKAFVRDSKALSNKKKEYLLTEEDISKFDVRKKFIERNLVDTRYASRVVLNALQEHFRVHKTDTKVSVVRGQFTSQLRRHWGIEKTRDTYHHHAVDALIIAASSQLNLWKKQKNTLVSYSEDQLLDIETGELISDDEYKESVFKAPYQHFVDTLKSKEFEDSILFSYQVDSKFNRKISDATIYATRQAKVGKDKKDETYVLGKIKDIYSQTGYDAFIKIYKKDKSKFLMYRHDPQTFEKVIEPILENYPNKELNEKGKEVPCNPFLKYKEDHGYIRKYSKKGNGPEIKSLKYYDSKLGNHIDITPKNSNNKVVLQSVSPWRADVYFNKTTGKYEILGLKYADLKFEKGTGTYKISEEKYNDIKIKEGVDSDSEFKFTLYKNDLLLIKDTETKEQQLFRFLSRTMPNVKHYVELKPYDKQKFDDNEELIKILGIVAKGGQCKKGVSKPNISIYKIRTDVLGNQHIIKNEGDKPKLDFSGGSSGGSKRTADGSEFESPKKKRKVSGGSSGGSTLNIEDEYRLHETSKEPDVSLGSTWLSDFPQAWAETGGMGLAVRQAPLIIPLKATSTPVSIKQYPMSQEARLGIKPHIQRLLDQGILVPCQSPWNTPLLPVKKPGTNDYRPVQDLREVNKRVEDIHPTVPNPYNLLSGLPPSHQWYTVLDLKDAFFCLRLHPTSQPLFAFEWRDPEMGISGQLTWTRLPQGFKNSPTLFNEALHRDLADFRIQHPDLILLQYVDDLLLAATSELDCQQGTRALLQTLGNLGYRASAKKAQICQKQVKYLGYLLKEGQRWLTEARKETVMGQPTPKTPRQLREFLGKAGFCRLFIPGFAEMAAPLYPLTKPGTLFNWGPDQQKAYQEIKQALLTAPALGLPDLTKPFELFVDEKQGYAKGVLTQKLGPWRRPVAYLSKKLDPVAAGWPPCLRMVAAIAVLTKDAGKLTMGQPLVILAPHAVEALVKQPPDRWLSNARMTHYQALLLDTDRVQFGPVVALNPATLLPLPEEGLQHNCLDILAEAHGTRPDLTDQPLPDADHTWYTDGSSLLQEGQRKAGAAVTTETEVIWAKALPAGTSAQRAELIALTQALKMAEGKKLNVYTDSRYAFATAHIHGEIYRRRGWLTSEGKEIKNKDEILALLKALFLPKRLSIIHCPGHQKGHSAEARGNRMADQAARKAAITETPDTSTLLIENSSPSGGSKRTADGSEFESPKKKRKVGSGPAAKRVKLDNQIRMKIGVMFGNPETTTGG

SEQ ID NO: 1288 - protein, 1935 aa, synthetic construct
MKRTADGSEFESPKKKRKVSDLVLGLDIGIGSVGVGILNKVTGEIIHKNSRIFPAAQAENNVERRINRQGRRLTRRKKHRRVRLNHLFEESGLITDFTNVSINLNPYQLRVKGLTDELSNEELFIALKNMVKHRGISYLDDASDDGNSSVGDYAQIVKENSKQLETKTPGQIQLERYQKYGQLRGDFTVEEDGKKHRLINVFPTSAYRAEALRILQTQQEFNPQITDEFINSYLQILTGKRKYYHGPGNEKSRTDYGRYTTKKDSEDEYITLDNIFGILIGKCTFYPEEYRAAKASYTAQEFNLLNDLNNLTVPTETKKLSEEQKNQIITNVKNEKAMGPAKLFKYIAKLLSCDVADIKGYRIDKSDKAEIHTFEAYRKMKTLATIDIEQMERENLDKLAYVLTLNTEKEGIQEALEHEFADGTFSQEQIDELVQFRKANSSIFGKGWHSFSVKLMMELIPELYATSEEQMTILTRLGKQKTTSSSNKTKYIDEKQLTEEIYNPVAAKSVRQAIKIVNAAIKEYGDFDNIVIEMARETNEDDEKKAIQKIQKANKDEKDAAMLKAANQYNGKAELPHSVFHGHKQLATKIRLWHQQGERCLYTGKTISIHDLINNSNQFEIDHILPLSITFDDSLANKVLVYATAAQEKGQRTPYQALDSMDDAWSFRELKAFVRDSKALSNKKKEYLLTEEDISKFDVRKKFIERNLVDTRYASRVVLNALQEHFRVHKTDTKVSVVRGQFTSQLRRHWGIEKTRDTYHHHAVDALIIAASSQLNLWKKQKNTLVSYSEDQLLDIETGELISDDEYKESVFKAPYQHFVDTLKSKEFEDSILFSYQVDSKFNRKISDATIYATRQAKVGKDKKDETYVLGKIKDIYSQTGYDAFIKIYKKDKSKFLMYRHDPQTFEKVIEPILENYPNKELNEKGKEVPCNPFLKYKEDHGYIRKYSKKGNGPEIKSLKYYDSKLGNHIDITPKNSNNKVVLQSVSPWRADVYFNKTTGKYEILGLKYADLKFEKGTGTYKISEEKYNDIKIKEGVDSDSEFKFTLYKNDLLLIKDTETKEQQLFRFLSRTMPNVKHYVELKPYDKQKFDDNEELIKILGIVAKGGQCKKGVSKPNISIYKIRTDVLGNQHIIKNEGDKPKLDFSGGSSGGSVTVKFKYKGEELEVDISKIKKVWRVGKMISFTYDLNGKTGRGAVSEKDAPKELLQMLEKSGKKSGGSSGGSTLNIEDEYRLHETSKEPDVSLGSTWLSDFPQAWAETGGMGLAVRQAPLIIPLKATSTPVSIKQYPMSQEARLGIKPHIQRLLDQGILVPCQSPWNTPLLPVKKPGTNDYRPVQDLREVNKRVEDIHPTVPNPYNLLSGLPPSHQWYTVLDLKDAFFCLRLHPTSQPLFAFEWRDPEMGISGQLTWTRLPQGFKNSPTLFNEALHRDLADFRIQHPDLILLQYVDDLLLAATSELDCQQGTRALLQTLGNLGYRASAKKAQICQKQVKYLGYLLKEGQRWLTEARKETVMGQPTPKTPRQLREFLGKAGFCRLFIPGFAEMAAPLYPLTKPGTLFNWGPDQQKAYQEIKQALLTAPALGLPDLTKPFELFVDEKQGYAKGVLTQKLGPWRRPVAYLSKKLDPVAAGWPPCLRMVAAIAVLTKDAGKLTMGQPLVILAPHAVEALVKQPPDRWLSNARMTHYQALLLDTDRVQFGPVVALNPATLLPLPEEGLQHNCLDILAEAHGTRPDLTDQPLPDADHTWYTDGSSLLQEGQRKAGAAVTTETEVIWAKALPAGTSAQRAELIALTQALKMAEGKKLNVYTDSRYAFATAHIHGEIYRRRGWLTSEGKEIKNKDEILALLKALFLPKRLSIIHCPGHQKGHSAEARGNRMADQAARKAAITETPDTSTLLIENSSPSGGSKRTADGSEFESPKKKRKVGSGPAAKRVKLD

SEQ ID NO: 1289 - protein, 1903 aa, synthetic construct
MKRTADGSEFESPKKKRKVSDLVLGLDIGIGSVGVGILNKVTGEIIHKNSRIFPAAQAENNVERRINRQGRRLTRRKKHRRVRLNHLFEESGLITDFTNVSINLNPYQLRVKGLTDELSNEELFIALKNMVKHRGISYLDDASDDGNSSVGDYAQIVKENSKQLETKTPGQIQLERYQKYGQLRGDFTVEEDGKKHRLINVFPTSAYRAEALRILQTQQEFNPQITDEFINSYLQILTGKRKYYHGPGNEKSRTDYGRYTTKKDSEDEYITLDNIFGILIGKCTFYPEEYRAAKASYTAQEFNLLNDLNNLTVPTETKKLSEEQKNQIITNVKNEKAMGPAKLFKYIAKLLSCDVADIKGYRIDKSDKAEIHTFEAYRKMKTLATIDIEQMERENLDKLAYVLTLNTEKEGIQEALEHEFADGTFSQEQIDELVQFRKANSSIFGKGWHSFSVKLMMELIPELYATSEEQMTILTRLGKQKTTSSSNKTKYIDEKQLTEEIYNPVAAKSVRQAIKIVNAAIKEYGDFDNIVIEMARETNEDDEKKAIQKIQKANKDEKDAAMLKAANQYNGKAELPHSVFHGHKQLATKIRLWHQQGERCLYTGKTISIHDLINNSNQFEIDHILPLSITFDDSLANKVLVYATAAQEKGQRTPYQALDSMDDAWSFRELKAFVRDSKALSNKKKEYLLTEEDISKFDVRKKFIERNLVDTRYASRVVLNALQEHFRVHKTDTKVSVVRGQFTSQLRRHWGIEKTRDTYHHHAVDALIIAASSQLNLWKKQKNTLVSYSEDQLLDIETGELISDDEYKESVFKAPYQHFVDTLKSKEFEDSILFSYQVDSKFNRKISDATIYATRQAKVGKDKKDETYVLGKIKDIYSQTGYDAFIKIYKKDKSKFLMYRHDPQTFEKVIEPILENYPNKELNEKGKEVPCNPFLKYKEDHGYIRKYSKKGNGPEIKSLKYYDSKLGNHIDITPKNSNNKVVLQSVSPWRADVYFNKTTGKYEILGLKYADLKFEKGTGTYKISEEKYNDIKIKEGVDSDSEFKFTLYKNDLLLIKDTETKEQQLFRFLSRTMPNVKHYVELKPYDKQKFDDNEELIKILGIVAKGGQCKKGVSKPNISIYKIRTDVLGNQHIIKNEGDKPKLDFSGGSSGGSKRTADGSEFESNQIRMKIGVMFGNPETTTGGSGGSSGGSTLNIEDEYRLHETSKEPDVSLGSTWLSDFPQAWAETGGMGLAVRQAPLIIPLKATSTPVSIKQYPMSQEARLGIKPHIQRLLDQGILVPCQSPWNTPLLPVKKPGTNDYRPVQDLREVNKRVEDIHPTVPNPYNLLSGLPPSHQWYTVLDLKDAFFCLRLHPTSQPLFAFEWRDPEMGISGQLTWTRLPQGFKNSPTLFNEALHRDLADFRIQHPDLILLQYVDDLLLAATSELDCQQGTRALLQTLGNLGYRASAKKAQICQKQVKYLGYLLKEGQRWLTEARKETVMGQPTPKTPRQLREFLGKAGFCRLFIPGFAEMAAPLYPLTKPGTLFNWGPDQQKAYQEIKQALLTAPALGLPDLTKPFELFVDEKQGYAKGVLTQKLGPWRRPVAYLSKKLDPVAAGWPPCLRMVAAIAVLTKDAGKLTMGQPLVILAPHAVEALVKQPPDRWLSNARMTHYQALLLDTDRVQFGPVVALNPATLLPLPEEGLQHNCLDILAEAHGTRPDLTDQPLPDADHTWYTDGSSLLQEGQRKAGAAVTTETEVIWAKALPAGTSAQRAELIALTQALKMAEGKKLNVYTDSRYAFATAHIHGEIYRRRGWLTSEGKEIKNKDEILALLKALFLPKRLSIIHCPGHQKGHSAEARGNRMADQAARKAAITETPDTSTLLIENSSPSGGSKRTADGSEFESPKKKRKVGSGPAAKRVKLD

SEQ ID NO: 1290 - protein, 1935 aa, synthetic construct
MKRTADGSEFESPKKKRKVSDLVLGLDIGIGSVGVGILNKVTGEIIHKNSRIFPAAQAENNVERRINRQGRRLTRRKKHRRVRLNHLFEESGLITDFTNVSINLNPYQLRVKGLTDELSNEELFIALKNMVKHRGISYLDDASDDGNSSVGDYAQIVKENSKQLETKTPGQIQLERYQKYGQLRGDFTVEEDGKKHRLINVFPTSAYRAEALRILQTQQEFNPQITDEFINSYLQILTGKRKYYHGPGNEKSRTDYGRYTTKKDSEDEYITLDNIFGILIGKCTFYPEEYRAAKASYTAQEFNLLNDLNNLTVPTETKKLSEEQKNQIITNVKNEKAMGPAKLFKYIAKLLSCDVADIKGYRIDKSDKAEIHTFEAYRKMKTLATIDIEQMERENLDKLAYVLTLNTEKEGIQEALEHEFADGTFSQEQIDELVQFRKANSSIFGKGWHSFSVKLMMELIPELYATSEEQMTILTRLGKQKTTSSSNKTKYIDEKQLTEEIYNPVAAKSVRQAIKIVNAAIKEYGDFDNIVIEMARETNEDDEKKAIQKIQKANKDEKDAAMLKAANQYNGKAELPHSVFHGHKQLATKIRLWHQQGERCLYTGKTISIHDLINNSNQFEIDHILPLSITFDDSLANKVLVYATAAQEKGQRTPYQALDSMDDAWSFRELKAFVRDSKALSNKKKEYLLTEEDISKFDVRKKFIERNLVDTRYASRVVLNALQEHFRVHKTDTKVSVVRGQFTSQLRRHWGIEKTRDTYHHHAVDALIIAASSQLNLWKKQKNTLVSYSEDQLLDIETGELISDDEYKESVFKAPYQHFVDTLKSKEFEDSILFSYQVDSKFNRKISDATIYATRQAKVGKDKKDETYVLGKIKDIYSQTGYDAFIKIYKKDKSKFLMYRHDPQTFEKVIEPILENYPNKELNEKGKEVPCNPFLKYKEDHGYIRKYSKKGNGPEIKSLKYYDSKLGNHIDITPKNSNNKVVLQSVSPWRADVYFNKTTGKYEILGLKYADLKFEKGTGTYKISEEKYNDIKIKEGVDSDSEFKFTLYKNDLLLIKDTETKEQQLFRFLSRTMPNVKHYVELKPYDKQKFDDNEELIKILGIVAKGGQCKKGVSKPNISIYKIRTDVLGNQHIIKNEGDKPKLDFSGGSSGGSVTVKFKYKGEELEVDISKIKKVWRVGKMISFTYDDNGKTGRGAVSEKDAPKELLQMLEKSGKKSGGSSGGSTLNIEDEYRLHETSKEPDVSLGSTWLSDFPQAWAETGGMGLAVRQAPLIIPLKATSTPVSIKQYPMSQEARLGIKPHIQRLLDQGILVPCQSPWNTPLLPVKKPGTNDYRPVQDLREVNKRVEDIHPTVPNPYNLLSGLPPSHQWYTVLDLKDAFFCLRLHPTSQPLFAFEWRDPEMGISGQLTWTRLPQGFKNSPTLFNEALHRDLADFRIQHPDLILLQYVDDLLLAATSELDCQQGTRALLQTLGNLGYRASAKKAQICQKQVKYLGYLLKEGQRWLTEARKETVMGQPTPKTPRQLREFLGKAGFCRLFIPGFAEMAAPLYPLTKPGTLFNWGPDQQKAYQEIKQALLTAPALGLPDLTKPFELFVDEKQGYAKGVLTQKLGPWRRPVAYLSKKLDPVAAGWPPCLRMVAAIAVLTKDAGKLTMGQPLVILAPHAVEALVKQPPDRWLSNARMTHYQALLLDTDRVQFGPVVALNPATLLPLPEEGLQHNCLDILAEAHGTRPDLTDQPLPDADHTWYTDGSSLLQEGQRKAGAAVTTETEVIWAKALPAGTSAQRAELIALTQALKMAEGKKLNVYTDSRYAFATAHIHGEIYRRRGWLTSEGKEIKNKDEILALLKALFLPKRLSIIHCPGHQKGHSAEARGNRMADQAARKAAITETPDTSTLLIENSSPSGGSKRTADGSEFESPKKKRKVGSGPAAKRVKLD

SEQ ID NO: 1291 - protein, 1935 aa, synthetic construct
MKRTADGSEFESPKKKRKVSDLVLGLDIGIGSVGVGILNKVTGEIIHKNSRIFPAAQAENNVERRINRQGRRLTRRKKHRRVRLNHLFEESGLITDFTNVSINLNPYQLRVKGLTDELSNEELFIALKNMVKHRGISYLDDASDDGNSSVGDYAQIVKENSKQLETKTPGQIQLERYQKYGQLRGDFTVEEDGKKHRLINVFPTSAYRAEALRILQTQQEFNPQITDEFINSYLQILTGKRKYYHGPGNEKSRTDYGRYTTKKDSEDEYITLDNIFGILIGKCTFYPEEYRAAKASYTAQEFNLLNDLNNLTVPTETKKLSEEQKNQIITNVKNEKAMGPAKLFKYIAKLLSCDVADIKGYRIDKSDKAEIHTFEAYRKMKTLATIDIEQMERENLDKLAYVLTLNTEKEGIQEALEHEFADGTFSQEQIDELVQFRKANSSIFGKGWHSFSVKLMMELIPELYATSEEQMTILTRLGKQKTTSSSNKTKYIDEKQLTEEIYNPVAAKSVRQAIKIVNAAIKEYGDFDNIVIEMARETNEDDEKKAIQKIQKANKDEKDAAMLKAANQYNGKAELPHSVFHGHKQLATKIRLWHQQGERCLYTGKTISIHDLINNSNQFEIDHILPLSITFDDSLANKVLVYATAAQEKGQRTPYQALDSMDDAWSFRELKAFVRDSKALSNKKKEYLLTEEDISKFDVRKKFIERNLVDTRYASRVVLNALQEHFRVHKTDTKVSVVRGQFTSQLRRHWGIEKTRDTYHHHAVDALIIAASSQLNLWKKQKNTLVSYSEDQLLDIETGELISDDEYKESVFKAPYQHFVDTLKSKEFEDSILFSYQVDSKFNRKISDATIYATRQAKVGKDKKDETYVLGKIKDIYSQTGYDAFIKIYKKDKSKFLMYRHDPQTFEKVIEPILENYPNKELNEKGKEVPCNPFLKYKEDHGYIRKYSKKGNGPEIKSLKYYDSKLGNHIDITPKNSNNKVVLQSVSPWRADVYFNKTTGKYEILGLKYADLKFEKGTGTYKISEEKYNDIKIKEGVDSDSEFKFTLYKNDLLLIKDTETKEQQLFRFLSRTMPNVKHYVELKPYDKQKFDDNEELIKILGIVAKGGQCKKGVSKPNISIYKIRTDVLGNQHIIKNEGDKPKLDFSGGSSGGSVTVKFKYKGEEKEVDISKIKKVWRVGKMISFTYDLNGKTGRGAVSEKDAPKELLQMLEKSGKKSGGSSGGSTLNIEDEYRLHETSKEPDVSLGSTWLSDFPQAWAETGGMGLAVRQAPLIIPLKATSTPVSIKQYPMSQEARLGIKPHIQRLLDQGILVPCQSPWNTPLLPVKKPGTNDYRPVQDLREVNKRVEDIHPTVPNPYNLLSGLPPSHQWYTVLDLKDAFFCLRLHPTSQPLFAFEWRDPEMGISGQLTWTRLPQGFKNSPTLFNEALHRDLADFRIQHPDLILLQYVDDLLLAATSELDCQQGTRALLQTLGNLGYRASAKKAQICQKQVKYLGYLLKEGQRWLTEARKETVMGQPTPKTPRQLREFLGKAGFCRLFIPGFAEMAAPLYPLTKPGTLFNWGPDQQKAYQEIKQALLTAPALGLPDLTKPFELFVDEKQGYAKGVLTQKLGPWRRPVAYLSKKLDPVAAGWPPCLRMVAAIAVLTKDAGKLTMGQPLVILAPHAVEALVKQPPDRWLSNARMTHYQALLLDTDRVQFGPVVALNPATLLPLPEEGLQHNCLDILAEAHGTRPDLTDQPLPDADHTWYTDGSSLLQEGQRKAGAAVTTETEVIWAKALPAGTSAQRAELIALTQALKMAEGKKLNVYTDSRYAFATAHIHGEIYRRRGWLTSEGKEIKNKDEILALLKALFLPKRLSIIHCPGHQKGHSAEARGNRMADQAARKAAITETPDTSTLLIENSSPSGGSKRTADGSEFESPKKKRKVGSGPAAKRVKLD

SEQ ID NO: 1292 - protein, 1727 aa, synthetic construct
MKRTADGSEFESPKKKRKVYPYDVPDYAKDKKSDGKDSQKKGSSDLVLGLDIGIGSVGVGILNKVTGEIIHKNSRIFPAAQAENNVERRINRQGRRLTRRKKHRRVRLNHLFEESGLITDFTNVSINLNPYQLRVKGLTDELSNEELFIALKNMVKHRGISYLDDASDDGNSSVGDYAQIVKENSKQLETKTPGQIQLERYQKYGQLRGDFTVEEDGKKHRLINVFPTSAYRAEALRILQTQQEFNPQITDEFINSYLQILTGKRKYYHGPGNEKSRTDYGRYTTKKDSEDEYITLDNIFGILIGKCTFYPEEYRAAKASYTAQEFNLLNDLNNLTVPTETKKLSEEQKNQIITNVKNEKAMGPAKLFKYIAKLLSCDVADIKGYRIDKSDKAEIHTFEAYRKMKTLATIDIEQMERENLDKLAYVLTLNTEKEGIQEALEHEFADGTFSQEQIDELVQFRKANSSIFGKGWHSFSVKLMMELIPELYATSEEQMTILTRLGKQKTTSSSNKTKYIDEKQLTEEIYNPVAAKSVRQAIKIVNAAIKEYGDFDNIVIEMARETNEDDEKKAIQKIQKANKDEKDAAMLKAANQYNGKAELPHSVFHGHKQLATKIRLWHQQGERCLYTGKTISIHDLINNSNQFEIDHILPLSITFDDSLANKVLVYATAAQEKGQRTPYQALDSMDDAWSFRELKAFVRDSKALSNKKKEYLLTEEDISKFDVRKKFIERNLVDTRYASRVVLNALQEHFRVHKTDTKVSVVRGQFTSQLRRHWGIEKTRDTYHHHAVDALIIAASSQLNLWKKQKNTLVSYSEDQLLDIETGELISDDEYKESVFKAPYQHFVDTLKSKEFEDSILFSYQVDSKFNRKISDATIYATRQAKVGKDKKDETYVLGKIKDIYSQTGYDAFIKIYKKDKSKFLMYRHDPQTFEKVIEPILENYPNKELNEKGKEVPCNPFLKYKEDHGYIRKYSKKGNGPEIKSLKYYDSKLGNHIDITPKNSNNKVVLQSVSPWRADVYFNKTTGKYEILGLKYADLKFEKGTGTYKISEEKYNDIKIKEGVDSDSEFKFTLYKNDLLLIKDTETKEQQLFRFLSRTMPNVKHYVELKPYDKQKFDDNEELIKILGIVAKGGQCKKGVSKPNISIYKIRTDVLGNQHIIKNEGDKPKLDFSGGSSGGSKRTADGSEFESPKKKRKVSGGSSGGSTLNIEDEYRLHETSKEPDVSLGSTWLSDFPQAWAETGGMGLAVRQAPLIIPLKATSTPVSIKQYPMSQEARLGIKPHIQRLLDQGILVPCQSPWNTPLLPVKKPGTNDYRPVQDLREVNKRVEDIHPTVPNPYNLLSGLPPSHQWYTVLDLKDAFFCLRLHPTSQPLFAFEWRDPEMGISGQLTWTRLPQGFKNSPTLFNEALHRDLADFRIQHPDLILLQYVDDLLLAATSELDCQQGTRALLQTLGNLGYRASAKKAQICQKQVKYLGYLLKEGQRWLTEARKETVMGQPTPKTPRQLREFLGKAGFCRLFIPGFAEMAAPLYPLTKPGTLFNWGPDQQKAYQEIKQALLTAPALGLPDLTKPFELFVDEKQGYAKGVLTQKLGPWRRPVAYLSKKLDPVAAGWPPCLRMVAAIAVLTKDAGKLTMGQPLVILAPHAVEALVKQPPDRWLSNARMTHYQALLLDTDRVQFGPVVALNPATLLPLPEEGSGGSKRTADGSEFESPKKKRKVGSGPAAKRVKLD

SEQ ID NO: 1293 - protein, 1729 aa, synthetic construct
MKRTADGSEFESPKKKRKVQPRFAAAGSGKDKKSDGKDSQKKGSGSDLVLGLDIGIGSVGVGILNKVTGEIIHKNSRIFPAAQAENNVERRINRQGRRLTRRKKHRRVRLNHLFEESGLITDFTNVSINLNPYQLRVKGLTDELSNEELFIALKNMVKHRGISYLDDASDDGNSSVGDYAQIVKENSKQLETKTPGQIQLERYQKYGQLRGDFTVEEDGKKHRLINVFPTSAYRAEALRILQTQQEFNPQITDEFINSYLQILTGKRKYYHGPGNEKSRTDYGRYTTKKDSEDEYITLDNIFGILIGKCTFYPEEYRAAKASYTAQEFNLLNDLNNLTVPTETKKLSEEQKNQIITNVKNEKAMGPAKLFKYIAKLLSCDVADIKGYRIDKSDKAEIHTFEAYRKMKTLATIDIEQMERENLDKLAYVLTLNTEKEGIQEALEHEFADGTFSQEQIDELVQFRKANSSIFGKGWHSFSVKLMMELIPELYATSEEQMTILTRLGKQKTTSSSNKTKYIDEKQLTEEIYNPVAAKSVRQAIKIVNAAIKEYGDFDNIVIEMARETNEDDEKKAIQKIQKANKDEKDAAMLKAANQYNGKAELPHSVFHGHKQLATKIRLWHQQGERCLYTGKTISIHDLINNSNQFEIDHILPLSITFDDSLANKVLVYATAAQEKGQRTPYQALDSMDDAWSFRELKAFVRDSKALSNKKKEYLLTEEDISKFDVRKKFIERNLVDTRYASRVVLNALQEHFRVHKTDTKVSVVRGQFTSQLRRHWGIEKTRDTYHHHAVDALIIAASSQLNLWKKQKNTLVSYSEDQLLDIETGELISDDEYKESVFKAPYQHFVDTLKSKEFEDSILFSYQVDSKFNRKISDATIYATRQAKVGKDKKDETYVLGKIKDIYSQTGYDAFIKIYKKDKSKFLMYRHDPQTFEKVIEPILENYPNKELNEKGKEVPCNPFLKYKEDHGYIRKYSKKGNGPEIKSLKYYDSKLGNHIDITPKNSNNKVVLQSVSPWRADVYFNKTTGKYEILGLKYADLKFEKGTGTYKISEEKYNDIKIKEGVDSDSEFKFTLYKNDLLLIKDTETKEQQLFRFLSRTMPNVKHYVELKPYDKQKFDDNEELIKILGIVAKGGQCKKGVSKPNISIYKIRTDVLGNQHIIKNEGDKPKLDFSGGSSGGSKRTADGSEFESPKKKRKVSGGSSGGSTLNIEDEYRLHETSKEPDVSLGSTWLSDFPQAWAETGGMGLAVRQAPLIIPLKATSTPVSIKQYPMSQEARLGIKPHIQRLLDQGILVPCQSPWNTPLLPVKKPGTNDYRPVQDLREVNKRVEDIHPTVPNPYNLLSGLPPSHQWYTVLDLKDAFFCLRLHPTSQPLFAFEWRDPEMGISGQLTWTRLPQGFKNSPTLFNEALHRDLADFRIQHPDLILLQYVDDLLLAATSELDCQQGTRALLQTLGNLGYRASAKKAQICQKQVKYLGYLLKEGQRWLTEARKETVMGQPTPKTPRQLREFLGKAGFCRLFIPGFAEMAAPLYPLTKPGTLFNWGPDQQKAYQEIKQALLTAPALGLPDLTKPFELFVDEKQGYAKGVLTQKLGPWRRPVAYLSKKLDPVAAGWPPCLRMVAAIAVLTKDAGKLTMGQPLVILAPHAVEALVKQPPDRWLSNARMTHYQALLLDTDRVQFGPVVALNPATLLPLPEEGSGGSKRTADGSEFESPKKKRKVGSGPAAKRVKLD

SEQ ID NO: 1294 - protein, 1753 aa, synthetic construct
MKRTADGSEFESPKKKRKVYPYDVPDYAQPRFAAAGSGKDGKKDKKEEDKKGSSDLVLGLDIGIGSVGVGILNKVTGEIIHKNSRIFPAAQAENNVERRINRQGRRLTRRKKHRRVRLNHLFEESGLITDFTNVSINLNPYQLRVKGLTDELSNEELFIALKNMVKHRGISYLDDASDDGNSSVGDYAQIVKENSKQLETKTPGQIQLERYQKYGQLRGDFTVEEDGKKHRLINVFPTSAYRAEALRILQTQQEFNPQITDEFINSYLQILTGKRKYYHGPGNEKSRTDYGRYTTKKDSEDEYITLDNIFGILIGKCTFYPEEYRAAKASYTAQEFNLLNDLNNLTVPTETKKLSEEQKNQIITNVKNEKAMGPAKLFKYIAKLLSCDVADIKGYRIDKSDKAEIHTFEAYRKMKTLATIDIEQMERENLDKLAYVLTLNTEKEGIQEALEHEFADGTFSQEQIDELVQFRKANSSIFGKGWHSFSVKLMMELIPELYATSEEQMTILTRLGKQKTTSSSNKTKYIDEKQLTEEIYNPVAAKSVRQAIKIVNAAIKEYGDFDNIVIEMARETNEDDEKKAIQKIQKANKDEKDAAMLKAANQYNGKAELPHSVFHGHKQLATKIRLWHQQGERCLYTGKTISIHDLINNSNQFEIDHILPLSITFDDSLANKVLVYATAAQEKGQRTPYQALDSMDDAWSFRELKAFVRDSKALSNKKKEYLLTEEDISKFDVRKKFIERNLVDTRYASRVVLNALQEHFRVHKTDTKVSVVRGQFTSQLRRHWGIEKTRDTYHHHAVDALIIAASSQLNLWKKQKNTLVSYSEDQLLDIETGELISDDEYKESVFKAPYQHFVDTLKSKEFEDSILFSYQVDSKFNRKISDATIYATRQAKVGKDKKDETYVLGKIKDIYSQTGYDAFIKIYKKDKSKFLMYRHDPQTFEKVIEPILENYPNKELNEKGKEVPCNPFLKYKEDHGYIRKYSKKGNGPEIKSLKYYDSKLGNHIDITPKNSNNKVVLQSVSPWRADVYFNKTTGKYEILGLKYADLKFEKGTGTYKISEEKYNDIKIKEGVDSDSEFKFTLYKNDLLLIKDTETKEQQLFRFLSRTMPNVKHYVELKPYDKQKFDDNEELIKILGIVAKGGQCKKGVSKPNISIYKIRTDVLGNQHIIKNEGDKPKLDFSGGSSGGSKRTADGSEFESPKKKRKVSGGSSGGSTLNIEDEYRLHETSKEPDVSLGSTWLSDFPQAWAETGGMGLAVRQAPLIIPLKATSTPVSIKQYPMSQEARLGIKPHIQRLLDQGILVPCQSPWNTPLLPVKKPGTNDYRPVQDLREVNKRVEDIHPTVPNPYNLLSGLPPSHQWYTVLDLKDAFFCLRLHPTSQPLFAFEWRDPEMGISGQLTWTRLPQGFKNSPTLFNEALHRDLADFRIQHPDLILLQYVDDLLLAATSELDCQQGTRALLQTLGNLGYRASAKKAQICQKQVKYLGYLLKEGQRWLTEARKETVMGQPTPKTPRQLREFLGKAGFCRLFIPGFAEMAAPLYPLTKPGTLFNWGPDQQKAYQEIKQALLTAPALGLPDLTKPFELFVDEKQGYAKGVLTQKLGPWRRPVAYLSKKLDPVAAGWPPCLRMVAAIAVLTKDAGKLTMGQPLVILAPHAVEALVKQPPDRWLSNARMTHYQALLLDTDRVQFGPVVALNPATLLPLPEEGSGGSKRTADGSEFESPKKKRKVGSGPAAKRVKLDGSGKDGKKDKKEEDKK

SEQ ID NO: 1295 - protein, 1753 aa, synthetic construct
MKRTADGSEFESPKKKRKVAYDPVDYPYQPRFAAAGSGKDKKSDGKDSQKKGSSDLVLGLDIGIGSVGVGILNKVTGEIIHKNSRIFPAAQAENNVERRINRQGRRLTRRKKHRRVRLNHLFEESGLITDFTNVSINLNPYQLRVKGLTDELSNEELFIALKNMVKHRGISYLDDASDDGNSSVGDYAQIVKENSKQLETKTPGQIQLERYQKYGQLRGDFTVEEDGKKHRLINVFPTSAYRAEALRILQTQQEFNPQITDEFINSYLQILTGKRKYYHGPGNEKSRTDYGRYTTKKDSEDEYITLDNIFGILIGKCTFYPEEYRAAKASYTAQEFNLLNDLNNLTVPTETKKLSEEQKNQIITNVKNEKAMGPAKLFKYIAKLLSCDVADIKGYRIDKSDKAEIHTFEAYRKMKTLATIDIEQMERENLDKLAYVLTLNTEKEGIQEALEHEFADGTFSQEQIDELVQFRKANSSIFGKGWHSFSVKLMMELIPELYATSEEQMTILTRLGKQKTTSSSNKTKYIDEKQLTEEIYNPVAAKSVRQAIKIVNAAIKEYGDFDNIVIEMARETNEDDEKKAIQKIQKANKDEKDAAMLKAANQYNGKAELPHSVFHGHKQLATKIRLWHQQGERCLYTGKTISIHDLINNSNQFEIDHILPLSITFDDSLANKVLVYATAAQEKGQRTPYQALDSMDDAWSFRELKAFVRDSKALSNKKKEYLLTEEDISKFDVRKKFIERNLVDTRYASRVVLNALQEHFRVHKTDTKVSVVRGQFTSQLRRHWGIEKTRDTYHHHAVDALIIAASSQLNLWKKQKNTLVSYSEDQLLDIETGELISDDEYKESVFKAPYQHFVDTLKSKEFEDSILFSYQVDSKFNRKISDATIYATRQAKVGKDKKDETYVLGKIKDIYSQTGYDAFIKIYKKDKSKFLMYRHDPQTFEKVIEPILENYPNKELNEKGKEVPCNPFLKYKEDHGYIRKYSKKGNGPEIKSLKYYDSKLGNHIDITPKNSNNKVVLQSVSPWRADVYFNKTTGKYEILGLKYADLKFEKGTGTYKISEEKYNDIKIKEGVDSDSEFKFTLYKNDLLLIKDTETKEQQLFRFLSRTMPNVKHYVELKPYDKQKFDDNEELIKILGIVAKGGQCKKGVSKPNISIYKIRTDVLGNQHIIKNEGDKPKLDFSGGSSGGSKRTADGSEFESPKKKRKVSGGSSGGSTLNIEDEYRLHETSKEPDVSLGSTWLSDFPQAWAETGGMGLAVRQAPLIIPLKATSTPVSIKQYPMSQEARLGIKPHIQRLLDQGILVPCQSPWNTPLLPVKKPGTNDYRPVQDLREVNKRVEDIHPTVPNPYNLLSGLPPSHQWYTVLDLKDAFFCLRLHPTSQPLFAFEWRDPEMGISGQLTWTRLPQGFKNSPTLFNEALHRDLADFRIQHPDLILLQYVDDLLLAATSELDCQQGTRALLQTLGNLGYRASAKKAQICQKQVKYLGYLLKEGQRWLTEARKETVMGQPTPKTPRQLREFLGKAGFCRLFIPGFAEMAAPLYPLTKPGTLFNWGPDQQKAYQEIKQALLTAPALGLPDLTKPFELFVDEKQGYAKGVLTQKLGPWRRPVAYLSKKLDPVAAGWPPCLRMVAAIAVLTKDAGKLTMGQPLVILAPHAVEALVKQPPDRWLSNARMTHYQALLLDTDRVQFGPVVALNPATLLPLPEEGSGGSKRTADGSEFESPKKKRKVGSGPAAKRVKLDGSGKDGKKDKKEEDKK

SEQ ID NO: 1296 - protein, 1753 aa, synthetic construct
MKRTADGSEFESPKKKRKVYPYELPEYGQPRFAAAGSGKDKKSDGKDSQKKGSSDLVLGLDIGIGSVGVGILNKVTGEIIHKNSRIFPAAQAENNVERRINRQGRRLTRRKKHRRVRLNHLFEESGLITDFTNVSINLNPYQLRVKGLTDELSNEELFIALKNMVKHRGISYLDDASDDGNSSVGDYAQIVKENSKQLETKTPGQIQLERYQKYGQLRGDFTVEEDGKKHRLINVFPTSAYRAEALRILQTQQEFNPQITDEFINSYLQILTGKRKYYHGPGNEKSRTDYGRYTTKKDSEDEYITLDNIFGILIGKCTFYPEEYRAAKASYTAQEFNLLNDLNNLTVPTETKKLSEEQKNQIITNVKNEKAMGPAKLFKYIAKLLSCDVADIKGYRIDKSDKAEIHTFEAYRKMKTLATIDIEQMERENLDKLAYVLTLNTEKEGIQEALEHEFADGTFSQEQIDELVQFRKANSSIFGKGWHSFSVKLMMELIPELYATSEEQMTILTRLGKQKTTSSSNKTKYIDEKQLTEEIYNPVAAKSVRQAIKIVNAAIKEYGDFDNIVIEMARETNEDDEKKAIQKIQKANKDEKDAAMLKAANQYNGKAELPHSVFHGHKQLATKIRLWHQQGERCLYTGKTISIHDLINNSNQFEIDHILPLSITFDDSLANKVLVYATAAQEKGQRTPYQALDSMDDAWSFRELKAFVRDSKALSNKKKEYLLTEEDISKFDVRKKFIERNLVDTRYASRVVLNALQEHFRVHKTDTKVSVVRGQFTSQLRRHWGIEKTRDTYHHHAVDALIIAASSQLNLWKKQKNTLVSYSEDQLLDIETGELISDDEYKESVFKAPYQHFVDTLKSKEFEDSILFSYQVDSKFNRKISDATIYATRQAKVGKDKKDETYVLGKIKDIYSQTGYDAFIKIYKKDKSKFLMYRHDPQTFEKVIEPILENYPNKELNEKGKEVPCNPFLKYKEDHGYIRKYSKKGNGPEIKSLKYYDSKLGNHIDITPKNSNNKVVLQSVSPWRADVYFNKTTGKYEILGLKYADLKFEKGTGTYKISEEKYNDIKIKEGVDSDSEFKFTLYKNDLLLIKDTETKEQQLFRFLSRTMPNVKHYVELKPYDKQKFDDNEELIKILGIVAKGGQCKKGVSKPNISIYKIRTDVLGNQHIIKNEGDKPKLDFSGGSSGGSKRTADGSEFESPKKKRKVSGGSSGGSTLNIEDEYRLHETSKEPDVSLGSTWLSDFPQAWAETGGMGLAVRQAPLIIPLKATSTPVSIKQYPMSQEARLGIKPHIQRLLDQGILVPCQSPWNTPLLPVKKPGTNDYRPVQDLREVNKRVEDIHPTVPNPYNLLSGLPPSHQWYTVLDLKDAFFCLRLHPTSQPLFAFEWRDPEMGISGQLTWTRLPQGFKNSPTLFNEALHRDLADFRIQHPDLILLQYVDDLLLAATSELDCQQGTRALLQTLGNLGYRASAKKAQICQKQVKYLGYLLKEGQRWLTEARKETVMGQPTPKTPRQLREFLGKAGFCRLFIPGFAEMAAPLYPLTKPGTLFNWGPDQQKAYQEIKQALLTAPALGLPDLTKPFELFVDEKQGYAKGVLTQKLGPWRRPVAYLSKKLDPVAAGWPPCLRMVAAIAVLTKDAGKLTMGQPLVILAPHAVEALVKQPPDRWLSNARMTHYQALLLDTDRVQFGPVVALNPATLLPLPEEGSGGSKRTADGSEFESPKKKRKVGSGPAAKRVKLDGSGKDGKKDKKEEDKK

SEQ ID NO: 1297 - protein, 1754 aa, synthetic construct
MKRTADGSEFESPKKKRKVGGGGSGGGGSQPRFAAAGSGKDKKSDGKDSQKKGSSDLVLGLDIGIGSVGVGILNKVTGEIIHKNSRIFPAAQAENNVERRINRQGRRLTRRKKHRRVRLNHLFEESGLITDFTNVSINLNPYQLRVKGLTDELSNEELFIALKNMVKHRGISYLDDASDDGNSSVGDYAQIVKENSKQLETKTPGQIQLERYQKYGQLRGDFTVEEDGKKHRLINVFPTSAYRAEALRILQTQQEFNPQITDEFINSYLQILTGKRKYYHGPGNEKSRTDYGRYTTKKDSEDEYITLDNIFGILIGKCTFYPEEYRAAKASYTAQEFNLLNDLNNLTVPTETKKLSEEQKNQIITNVKNEKAMGPAKLFKYIAKLLSCDVADIKGYRIDKSDKAEIHTFEAYRKMKTLATIDIEQMERENLDKLAYVLTLNTEKEGIQEALEHEFADGTFSQEQIDELVQFRKANSSIFGKGWHSFSVKLMMELIPELYATSEEQMTILTRLGKQKTTSSSNKTKYIDEKQLTEEIYNPVAAKSVRQAIKIVNAAIKEYGDFDNIVIEMARETNEDDEKKAIQKIQKANKDEKDAAMLKAANQYNGKAELPHSVFHGHKQLATKIRLWHQQGERCLYTGKTISIHDLINNSNQFEIDHILPLSITFDDSLANKVLVYATAAQEKGQRTPYQALDSMDDAWSFRELKAFVRDSKALSNKKKEYLLTEEDISKFDVRKKFIERNLVDTRYASRVVLNALQEHFRVHKTDTKVSVVRGQFTSQLRRHWGIEKTRDTYHHHAVDALIIAASSQLNLWKKQKNTLVSYSEDQLLDIETGELISDDEYKESVFKAPYQHFVDTLKSKEFEDSILFSYQVDSKFNRKISDATIYATRQAKVGKDKKDETYVLGKIKDIYSQTGYDAFIKIYKKDKSKFLMYRHDPQTFEKVIEPILENYPNKELNEKGKEVPCNPFLKYKEDHGYIRKYSKKGNGPEIKSLKYYDSKLGNHIDITPKNSNNKVVLQSVSPWRADVYFNKTTGKYEILGLKYADLKFEKGTGTYKISEEKYNDIKIKEGVDSDSEFKFTLYKNDLLLIKDTETKEQQLFRFLSRTMPNVKHYVELKPYDKQKFDDNEELIKILGIVAKGGQCKKGVSKPNISIYKIRTDVLGNQHIIKNEGDKPKLDFSGGSSGGSKRTADGSEFESPKKKRKVSGGSSGGSTLNIEDEYRLHETSKEPDVSLGSTWLSDFPQAWAETGGMGLAVRQAPLIIPLKATSTPVSIKQYPMSQEARLGIKPHIQRLLDQGILVPCQSPWNTPLLPVKKPGTNDYRPVQDLREVNKRVEDIHPTVPNPYNLLSGLPPSHQWYTVLDLKDAFFCLRLHPTSQPLFAFEWRDPEMGISGQLTWTRLPQGFKNSPTLFNEALHRDLADFRIQHPDLILLQYVDDLLLAATSELDCQQGTRALLQTLGNLGYRASAKKAQICQKQVKYLGYLLKEGQRWLTEARKETVMGQPTPKTPRQLREFLGKAGFCRLFIPGFAEMAAPLYPLTKPGTLFNWGPDQQKAYQEIKQALLTAPALGLPDLTKPFELFVDEKQGYAKGVLTQKLGPWRRPVAYLSKKLDPVAAGWPPCLRMVAAIAVLTKDAGKLTMGQPLVILAPHAVEALVKQPPDRWLSNARMTHYQALLLDTDRVQFGPVVALNPATLLPLPEEGSGGSKRTADGSEFESPKKKRKVGSGPAAKRVKLDGSGKDGKKDKKEEDKK

SEQ ID NO: 1298 - protein, 1753 aa, synthetic construct
MKRTADGSEFESPKKKRKVQFELADPYTQPRFAAAGSGKDKKSDGKDSQKKGSSDLVLGLDIGIGSVGVGILNKVTGEIIHKNSRIFPAAQAENNVERRINRQGRRLTRRKKHRRVRLNHLFEESGLITDFTNVSINLNPYQLRVKGLTDELSNEELFIALKNMVKHRGISYLDDASDDGNSSVGDYAQIVKENSKQLETKTPGQIQLERYQKYGQLRGDFTVEEDGKKHRLINVFPTSAYRAEALRILQTQQEFNPQITDEFINSYLQILTGKRKYYHGPGNEKSRTDYGRYTTKKDSEDEYITLDNIFGILIGKCTFYPEEYRAAKASYTAQEFNLLNDLNNLTVPTETKKLSEEQKNQIITNVKNEKAMGPAKLFKYIAKLLSCDVADIKGYRIDKSDKAEIHTFEAYRKMKTLATIDIEQMERENLDKLAYVLTLNTEKEGIQEALEHEFADGTFSQEQIDELVQFRKANSSIFGKGWHSFSVKLMMELIPELYATSEEQMTILTRLGKQKTTSSSNKTKYIDEKQLTEEIYNPVAAKSVRQAIKIVNAAIKEYGDFDNIVIEMARETNEDDEKKAIQKIQKANKDEKDAAMLKAANQYNGKAELPHSVFHGHKQLATKIRLWHQQGERCLYTGKTISIHDLINNSNQFEIDHILPLSITFDDSLANKVLVYATAAQEKGQRTPYQALDSMDDAWSFRELKAFVRDSKALSNKKKEYLLTEEDISKFDVRKKFIERNLVDTRYASRVVLNALQEHFRVHKTDTKVSVVRGQFTSQLRRHWGIEKTRDTYHHHAVDALIIAASSQLNLWKKQKNTLVSYSEDQLLDIETGELISDDEYKESVFKAPYQHFVDTLKSKEFEDSILFSYQVDSKFNRKISDATIYATRQAKVGKDKKDETYVLGKIKDIYSQTGYDAFIKIYKKDKSKFLMYRHDPQTFEKVIEPILENYPNKELNEKGKEVPCNPFLKYKEDHGYIRKYSKKGNGPEIKSLKYYDSKLGNHIDITPKNSNNKVVLQSVSPWRADVYFNKTTGKYEILGLKYADLKFEKGTGTYKISEEKYNDIKIKEGVDSDSEFKFTLYKNDLLLIKDTETKEQQLFRFLSRTMPNVKHYVELKPYDKQKFDDNEELIKILGIVAKGGQCKKGVSKPNISIYKIRTDVLGNQHIIKNEGDKPKLDFSGGSSGGSKRTADGSEFESPKKKRKVSGGSSGGSTLNIEDEYRLHETSKEPDVSLGSTWLSDFPQAWAETGGMGLAVRQAPLIIPLKATSTPVSIKQYPMSQEARLGIKPHIQRLLDQGILVPCQSPWNTPLLPVKKPGTNDYRPVQDLREVNKRVEDIHPTVPNPYNLLSGLPPSHQWYTVLDLKDAFFCLRLHPTSQPLFAFEWRDPEMGISGQLTWTRLPQGFKNSPTLFNEALHRDLADFRIQHPDLILLQYVDDLLLAATSELDCQQGTRALLQTLGNLGYRASAKKAQICQKQVKYLGYLLKEGQRWLTEARKETVMGQPTPKTPRQLREFLGKAGFCRLFIPGFAEMAAPLYPLTKPGTLFNWGPDQQKAYQEIKQALLTAPALGLPDLTKPFELFVDEKQGYAKGVLTQKLGPWRRPVAYLSKKLDPVAAGWPPCLRMVAAIAVLTKDAGKLTMGQPLVILAPHAVEALVKQPPDRWLSNARMTHYQALLLDTDRVQFGPVVALNPATLLPLPEEGSGGSKRTADGSEFESPKKKRKVGSGPAAKRVKLDGSGKDGKKDKKEEDKK

SEQ ID NO: 1299 - protein, 1703 aa, synthetic construct
MKRTADGSEFESPKKKRKVSDLVLGLDIGIGSVGVGILNKVTGEIIHKNSRIFPAAQAENNVERRINRQGRRLTRRKKHRRVRLNHLFEESGLITDFTNVSINLNPYQLRVKGLTDELSNEELFIALKNMVKHRGISYLDDASDDGNSSVGDYAQIVKENSKQLETKTPGQIQLERYQKYGQLRGDFTVEEDGKKHRLINVFPTSAYRAEALRILQTQQEFNPQITDEFINSYLQILTGKRKYYHGPGNEKSRTDYGRYTTKKDSEDEYITLDNIFGILIGKCTFYPEEYRAAKASYTAQEFNLLNDLNNLTVPTETKKLSEEQKNQIITNVKNEKAMGPAKLFKYIAKLLSCDVADIKGYRIDKSDKAEIHTFEAYRKMKTLATIDIEQMERENLDKLAYVLTLNTEKEGIQEALEHEFADGTFSQEQIDELVQFRKANSSIFGKGWHSFSVKLMMELIPELYATSEEQMTILTRLGKQKTTSSSNKTKYIDEKQLTEEIYNPVAAKSVRQAIKIVNAAIKEYGDFDNIVIEMARETNEDDEKKAIQKIQKANKDEKDAAMLKAANQYNGKAELPHSVFHGHKQLATKIRLWHQQGERCLYTGKTISIHDLINNSNQFEIDHILPLSITFDDSLANKVLVYATAAQEKGQRTPYQALDSMDDAWSFRELKAFVRDSKALSNKKKEYLLTEEDISKFDVRKKFIERNLVDTRYASRVVLNALQEHFRVHKTDTKVSVVRGQFTSQLRRHWGIEKTRDTYHHHAVDALIIAASSQLNLWKKQKNTLVSYSEDQLLDIETGELISDDEYKESVFKAPYQHFVDTLKSKEFEDSILFSYQVDSKFNRKISDATIYATRQAKVGKDKKDETYVLGKIKDIYSQTGYDAFIKIYKKDKSKFLMYRHDPQTFEKVIEPILENYPNKELNEKGKEVPCNPFLKYKEDHGYIRKYSKKGNGPEIKSLKYYDSKLGNHIDITPKNSNNKVVLQSVSPWRADVYFNKTTGKYEILGLKYADLKFEKGTGTYKISEEKYNDIKIKEGVDSDSEFKFTLYKNDLLLIKDTETKEQQLFRFLSRTMPNVKHYVELKPYDKQKFDDNEELIKILGIVAKGGQCKKGVSKPNISIYKIRTDVLGNQHIIKNEGDKPKLDFSGGSSGGSKRTADGSEFESPKKKRKVSGGSSGGSTLNIEDEYRLHETSKEPDVSLGSTWLSDFPQAWAETGGMGLAVRQAPLIIPLKATSTPVSIKQYPMSQEARLGIKPHIQRLLDQGILVPCQSPWNTPLLPVKKPGTNDYRPVQDLREVNKRVEDIHPTVPNPYNLLSGLPPSHQWYTVLDLKDAFFCLRLHPTSQPLFAFEWRDPEMGISGQLTWTRLPQGFKNSPTLFNEALHRDLADFRIQHPDLILLQYVDDLLLAATSELDCQQGTRALLQTLGNLGYRASAKKAQICQKQVKYLGYLLKEGQRWLTEARKETVMGQPTPKTPRQLREFLGKAGFCRLFIPGFAEMAAPLYPLTKPGTLFNWGPDQQKAYQEIKQALLTAPALGLPDLTKPFELFVDEKQGYAKGVLTQKLGPWRRPVAYLSKKLDPVAAGWPPCLRMVAAIAVLTKDAGKLTMGQPLVILAPHAVEALVKQPPDRWLSNARMTHYQALLLDTDRVQFGPVVALNPATLLPLPEEGSGGSKRTADGSEFESPKKKRKVGSGPAAKRVKLD

SEQ ID NO: 1300 - protein, 1890 aa, synthetic construct; identical to SEQ ID NO: 1036

SEQ ID NO: 1301 - RNA, 6215 nt, synthetic construct
  source 1..6215: mol_type = other RNA
aggaaataagagagaaaagaagagtaagaagaaatataagagccaccatgaaacggacagccgacggaagcgagttcgagtcaccaaagaagaagcggaaagtcagcgacctcgtgctgggcctcgacatcgggatcggaagcgtcggcgtgggaatcctgaacaaggtcaccggcgagatcatccacaagaacagtagaatcttccctgccgcccaggccgagaacaatgtggagcgcagaattaatagacagggcagaagactgaccagacggaagaagcacagaagagtgcggctgaaccatctgttcgaggagtccggactgatcaccgacttcacaaacgtgagcatcaacctgaacccttatcagctgagagtgaagggcctgaccgacgaactgagcaatgaggagctgttcatcgccctgaagaatatggtcaaacaccggggcatcagctacctggacgacgccagcgatgacggaaacagcagcgtgggcgactacgcccagatcgtgaaagagaacagcaagcagctggaaacaaagacccccggccagatccagctggagcggtaccagaagtacggccaactgcggggagacttcacagtggaagaagacggcaagaagcacagactgattaacgtcttccctaccagcgcctacagggccgaggccctgcggatactgcagacccagcaagagttcaaccctcagattaccgacgaattcatcaactcttacctgcagatcctgaccggaaagaggaagtactaccacggccccggcaacgaaaagagcagaacggattacggaagatacaccacaaagaaagatagcgaggacgagtacatcacgctggacaacatcttcggcatcctgatcggcaagtgcaccttctaccctgaggaatacagagccgccaaggccagctacaccgcccaggagtttaacctgctgaacgatctgaacaacctgacagtgcccaccgagacaaagaaactgtccgaggagcagaagaaccagattatcaccaacgtcaagaacgaaaaggccatgggacccgccaagctgttcaagtacatagccaagctcctgtcctgtgacgtggccgacatcaagggctaccgaatcgacaagtccgataaggccgagatccacaccttcgaggcctacagaaagatgaagaccctggcaacaatagacatagaacaaatggagagagagaacctggacaagctcgcatacgtgctcaccctgaacacagagaaggaaggaatacaggaggccctggagcatgaatttgctgacggaacctttagccaggagcaaatcgacgaactagtgcagttccggaaagccaactcaagcatctttggcaagggctggcacagcttcagcgtcaagctgatgatggagctgatccctgagctgtacgccaccagcgaggagcagatgacaatcctgaccagactgggcaagcaaaagacaaccagcagcagcaacaaaaccaagtacatcgacgagaagcagctgaccgaggaaatctacaatcccgtggccgccaaaagcgtgcgccaggccatcaaaatcgtgaacgccgccatcaaggaatacggcgacttcgacaacattgtgatcgaaatggcaagagagacaaacgaggacgatgaaaagaaggctatccagaaaatccagaaagccaataaggacgagaaagacgccgccatgctgaaggccgccaaccaatataacggcaaggccgagctgcctcacagtgtattccacggccacaagcagctggccaccaagatccggctgtggcaccagcagggcgagagatgcctgtatacaggtaaaaccatcagcatccacgacctgatcaacaacagcaaccagttcgaaatcgatcatatcctgcccctaagcatcacgttcgacgactccctggccaacaaagtgctggtgtacgctaccgcagcccaagagaaaggccagcggaccccttaccaggccctggacagcatggatgacgcctggtccttcagagagctaaaggccttcgtgcgggacagcaaagccctgagcaacaaaaagaaggagtacctgctgacagaggaggacatctccaagttcgacgtgagaaagaagttcatcgagcggaacctggtggacacccggtacgccagcagagtggtgctgaacgcgctacaggagcacttcagagtgcacaagacagacacaaaggtgtctgtggtgagaggccagttcacctcccagctgcggagacactggggcatcgagaaaacaagagacacctaccaccaccacgccgtggatgctctgatcatcgccgcaagcagccagctcaacctgtggaagaagcagaagaacacactggtgagctacagcgaagaccagctgctggacattgaaacgggcgaactgattagcgatgacgagtacaaggaaagcgtgtttaaagccccttaccagcactttgtcgacaccctgaagagtaaggagttcgaggacagcatcctgttctcctaccaagtggacagcaagttcaacagaaagatcagcgacgccaccatctacgccaccagacaggccaaagtgggcaaggacaagaaggacgagacatacgtgctgggcaagatcaaagacatttacagccagaccggatacgacgcctttataaagatatacaaaaaagacaagagcaagttcctgatgtacagacacgaccctcagaccttcgagaaggtgatcgaacctatcctggagaactaccctaacaaagaactgaatgagggaggaggaggaagcggaggaggaggatccgtgaccgtgaagttcaagtacaagggcgaggagctggaggtggacatctccaagatcaagaaggtctggcgggtgggcaagatgatctcttttacctatgacgataacggcaagacaggcagaggcgccgtgagcgagaaggatgcccccaaggagctgctgcagatgctggagaagtccggcaagaagggaggaggaggatctggcggcggcggcagcaagggcaaagaggtaccatgcaacccatttctgaaatacaaggaggaccacggctacatcagaaagtacagcaaaaaaggaaacggccccgaaatcaagagcctgaagtactacgatagcaagctgggcaatcacatagacatcacacccaagaactccaacaacaaggtcgttctgcagagcgtgtccccttggcgggctgacgtgtacttcaataagaccaccggcaaatacgaaatcctgggcctgaagtacgcggacctgaagttcgaaaagggcacaggcacatacaagatcagcgaggaaaagtacaacgacatcaaaatcaaggagggcgtggacagcgacagcgaattcaagttcaccctgtacaagaacgacctgctgctgatcaaggatacggaaacaaaggagcagcaactattccggttcctgagccggaccatgccaaatgtgaagcattacgtagaactgaaaccatacgataaacagaaattcgatgacaacgaggagctgatcaagatcctggggatcgtggccaagggaggccagtgcaagaagggcgtgtccaaaccaaacatcagcatctacaagatcagaaccgacgtgctgggcaaccagcacatcatcaagaacgaaggcgataagcccaagctggacttctccggcggaagctctggtggcagcaagcggaccgccgacggctctgaattcgagagccctaagaagaaaagaaaggtgagcggaggctctagcggcggaagcaccctgaacattgaagacgagtatagactgcatgaaacaagcaaggaacccgacgtgtccctgggctccacctggctgtccgactttccccaggcctgggccgagacaggaggaatgggcctggccgtgcggcaggcacccctgatcatccctctgaaggccacctctacacccgtgagcatcaagcagtaccctatgtctcaggaggccagactgggcatcaagcctcacatccagaggctgctggaccagggcatcctggtgccatgccagagcccctggaacacaccactgctgcccgtgaagaagccaggcaccaatgactatagacccgtgcaggatctgagagaggtgaacaagagggtggaggatatccaccccaccgtgcccaacccttacaatctgctgtccggcctgcccccttctcaccagtggtatacagtgctggacctgaaggatgccttcttttgtctgagactgcaccctaccagccagccactgttcgcctttgagtggagggaccctgagatgggcatctctggccagctgacctggacacgcctgcctcagggcttcaagaatagcccaacactgtttaacgaggccctgcaccgcgacctggcagatttccggatccagcacccagatctgatcctgctgcagtacgtggacgatctgctgctggccgccaccagcgagctggattgccagcagggaacacgcgccctgctgcagaccctgggaaacctgggatatagggcatccgccaagaaggcccagatctgtcagaagcaggtgaagtacctgggctatctgctgaaggagggccagagatggctgacagaggccaggaaggagacagtgatgggccagccaacacccaagaccccaagacagctgagggagttcctgggcaaagcaggattttgcaggctgttcatcccaggattcgcagagatggcagcacctctgtacccactgaccaagccgggcaccctgtttaattggggccctgaccagcagaaggcctatcaggagatcaagcaggccctgctgacagcaccagccctgggcctgccagacctgaccaagcctttcgagctgtttgtggatgagaagcagggctacgccaagggcgtgctgacccagaagctgggaccatggagacggcccgtggcctatctgtccaagaagctggacccagtggcagcaggatggccaccatgcctgaggatggtggcagcaatcgccgtgctgacaaaggatgccggcaagctgaccatgggacagccactggtcatcctggcaccacacgcagtggaggccctggtgaagcagcctccagatcgctggctgtctaacgcccggatgacacactaccaggccctgctgctggacaccgatcgcgtgcagtttggccctgtggtggccctgaatccagccaccctgctgcctctgccagaggagggcctgcagcacaactgtctggacatcctggcagaggcacacggaacaaggccagacctgaccgatcagcccctgcctgacgccgatcacacatggtataccgatggaagctccctgctgcaggagggccagaggaaggcaggagcagcagtgaccacagagacagaagtgatctgggccaaggccctgccagcaggcacatccgcccagcgggccgagctgatcgccctgacccaggccctgaagatggccgagggcaagaagctgaacgtgtacacagactccagatatgccttcgccaccgcacacatccacggagagatctacaggcgccggggctggctgacctctgagggcaaggagatcaagaacaaggatgagatcctggccctgctgaaggccctgtttctgcccaagcggctgagcatcatccactgtcctggacaccagaagggacactccgccgaggcaaggggcaatcggatggccgaccaggccgccagaaaggctgctattactgaaactcccgacacttccactctgctgattgaaaactcctccccttctggcggctcaaaaagaaccgccgacggcagcgaattcgagtctcccaagaagaagaggaaagtcggctctggccctgccgctaagagagtgaagctggactaatagtgagctggagcctcggtggccatgcttcttgccccttgggcctccccccagcccctcctccccttcctgcacccgtacccccgtggtctttgaataaagtctgagtgggcggcaaaaaaaaaaaaaaacaaaaaaaaaaaaaaaaaaaaaaaaaaaccaaaaaaaaaaaaaaaaaaaaaaaaaaaaaaaaaaaccccaaaaaaaaaaaaaaaaaaaaaaaaaaaaaaaaaaaaaaaaaaaaaa

SEQ ID NO: 1302 - RNA, 6215 nt, synthetic construct
  source 1..6215: mol_type = other RNA
aggaaataagagagaaaagaagagtaagaagaaatataagagccaccatgaaacggacagccgacggaagcgagttcgagtcaccaaagaagaagcggaaagtcagcgacctcgtgctgggcctcgacatcgggatcggaagcgtcggcgtgggaatcctgaacaaggtcaccggcgagatcatccacaagaacagtagaatcttccctgccgcccaggccgagaacaatgtggagcgcagaattaatagacagggcagaagactgaccagacggaagaagcacagaagagtgcggctgaaccatctgttcgaggagtccggactgatcaccgacttcacaaacgtgagcatcaacctgaacccttatcagctgagagtgaagggcctgaccgacgaactgagcaatgaggagctgttcatcgccctgaagaatatggtcaaacaccggggcatcagctacctggacgacgccagcgatgacggaaacagcagcgtgggcgactacgcccagatcgtgaaagagaacagcaagcagctggaaacaaagacccccggccagatccagctggagcggtaccagaagtacggccaactgcggggagacttcacagtggaagaagacggcaagaagcacagactgattaacgtcttccctaccagcgcctacagggccgaggccctgcggatactgcagacccagcaagagttcaaccctcagattaccgacgaattcatcaactcttacctgcagatcctgaccggaaagaggaagtactaccacggccccggcaacgaaaagagcagaacggattacggaagatacaccacaaagaaagatagcgaggacgagtacatcacgctggacaacatcttcggcatcctgatcggcaagtgcaccttctaccctgaggaatacagagccgccaaggccagctacaccgcccaggagtttaacctgctgaacgatctgaacaacctgacagtgcccaccgagacaaagaaactgtccgaggagcagaagaaccagattatcaccaacgtcaagaacgaaaaggccatgggacccgccaagctgttcaagtacatagccaagctcctgtcctgtgacgtggccgacatcaagggctaccgaatcgacaagtccgataaggccgagatccacaccttcgaggcctacagaaagatgaagaccctggcaacaatagacatagaacaaatggagagagagaacctggacaagctcgcatacgtgctcaccctgaacacagagaaggaaggaatacaggaggccctggagcatgaatttgctgacggaacctttagccaggagcaaatcgacgaactagtgcagttccggaaagccaactcaagcatctttggcaagggctggcacagcttcagcgtcaagctgatgatggagctgatccctgagctgtacgccaccagcgaggagcagatgacaatcctgaccagactgggcaagcaaaagacaaccagcagcagcaacaaaaccaagtacatcgacgagaagcagctgaccgaggaaatctacaatcccgtggccgccaaaagcgtgcgccaggccatcaaaatcgtgaacgccgccatcaaggaatacggcgacttcgacaacattgtgatcgaaatggcaagagagacaaacgaggacgatgaaaagaaggctatccagaaaatccagaaagccaataaggacgagaaagacgccgccatgctgaaggccgccaaccaatataacggcaaggccgagctgcctcacagtgtattccacggccacaagcagctggccaccaagatccggctgtggcaccagcagggcgagagatgcctgtatacaggtaaaaccatcagcatccacgacctgatcaacaacagcaaccagttcgaaatcgatcatatcctgcccctaagcatcacgttcgacgactccctggccaacaaagtgctggtgtacgctaccgcagcccaagagaaaggccagcggaccccttaccaggccctggacagcatggatgacgcctggtccttcagagagctaaaggccttcgtgcgggacagcaaagccctgagcaacaaaaagaaggagtacctgctgacagaggaggacatctccaagttcgacgtgagaaagaagttcatcgagcggaacctggtggacacccggtacgccagcagagtggtgctgaacgcgctacaggagcacttcagagtgcacaagacagacacaaaggtgtctgtggtgagaggccagttcacctcccagctgcggagacactggggcatcgagaaaacaagagacacctaccaccaccacgccgtggatgctctgatcatcgccgcaagcagccagctcaacctgtggaagaagcagaagaacacactggtgagctacagcgaagaccagctgctggacattgaaacgggcgaactgattagcgatgacgagtacaaggaaagcgtgtttaaagccccttaccagcactttgtcgacaccctgaagagtaaggagttcgaggacagcatcctgttctcctaccaagtggacagcaagttcaacagaaagatcagcgacgccaccatctacgccaccagacaggccaaagtgggcaaggacaagaaggacgagacatacgtgctgggcaagatcaaagacatttacagccagaccggatacgacgcctttataaagatatacaaaaaagacaagagcaagttcctgatgtacagacacgaccctcagaccttcgagaaggtgatcgaacctatcctggagaactaccctaacaaagaactgaatgagggaggaggaggaagcggaggaggaggatccgtgaccgtgaagttcaagtacaagggcgaggagaaggaggtggacatctccaagatcaagaaggtctggcgggtgggcaagatgatctcttttacctatgacctgaacggcaagacaggcagaggcgccgtgagcgagaaggatgcccccaaggagctgctgcagatgctggagaagtccggcaagaagggaggaggaggatctggcggcggcggcagcaagggcaaagaggtaccatgcaacccatttctgaaatacaaggaggaccacggctacatcagaaagtacagcaaaaaaggaaacggccccgaaatcaagagcctgaagtactacgatagcaagctgggcaatcacatagacatcacacccaagaactccaacaacaaggtcgttctgcagagcgtgtccccttggcgggctgacgtgtacttcaataagaccaccggcaaatacgaaatcctgggcctgaagtacgcggacctgaagttcgaaaagggcacaggcacatacaagatcagcgaggaaaagtacaacgacatcaaaatcaaggagggcgtggacagcgacagcgaattcaagttcaccctgtacaagaacgacctgctgctgatcaaggatacggaaacaaaggagcagcaactattccggttcctgagccggaccatgccaaatgtgaagcattacgtagaactgaaaccatacgataaacagaaattcgatgacaacgaggagctgatcaagatcctggggatcgtggccaagggaggccagtgcaagaagggcgtgtccaaaccaaacatcagcatctacaagatcagaaccgacgtgctgggcaaccagcacatcatcaagaacgaaggcgataagcccaagctggacttctccggcggaagctctggtggcagcaagcggaccgccgacggctctgaattcgagagccctaagaagaaaagaaaggtgagcggaggctctagcggcggaagcaccctgaacattgaagacgagtatagactgcatgaaacaagcaaggaacccgacgtgtccctgggctccacctggctgtccgactttccccaggcctgggccgagacaggaggaatgggcctggccgtgcggcaggcacccctgatcatccctctgaaggccacctctacacccgtgagcatcaagcagtaccctatgtctcaggaggccagactgggcatcaagcctcacatccagaggctgctggaccagggcatcctggtgccatgccagagcccctggaacacaccactgctgcccgtgaagaagccaggcaccaatgactatagacccgtgcaggatctgagagaggtgaacaagagggtggaggatatccaccccaccgtgcccaacccttacaatctgctgtccggcctgcccccttctcaccagtggtatacagtgctggacctgaaggatgccttcttttgtctgagactgcaccctaccagccagccactgttcgcctttgagtggagggaccctgagatgggcatctctggccagctgacctggacacgcctgcctcagggcttcaagaatagcccaacactgtttaacgaggccctgcaccgcgacctggcagatttccggatccagcacccagatctgatcctgctgcagtacgtggacgatctgctgctggccgccaccagcgagctggattgccagcagggaacacgcgccctgctgcagaccctgggaaacctgggatatagggcatccgccaagaaggcccagatctgtcagaagcaggtgaagtacctgggctatctgctgaaggagggccagagatggctgacagaggccaggaaggagacagtgatgggccagccaacacccaagaccccaagacagctgagggagttcctgggcaaagcaggattttgcaggctgttcatcccaggattcgcagagatggcagcacctctgtacccactgaccaagccgggcaccctgtttaattggggccctgaccagcagaaggcctatcaggagatcaagcaggccctgctgacagcaccagccctgggcctgccagacctgaccaagcctttcgagctgtttgtggatgagaagcagggctacgccaagggcgtgctgacccagaagctgggaccatggagacggcccgtggcctatctgtccaagaagctggacccagtggcagcaggatggccaccatgcctgaggatggtggcagcaatcgccgtgctgacaaaggatgccggcaagctgaccatgggacagccactggtcatcctggcaccacacgcagtggaggccctggtgaagcagcctccagatcgctggctgtctaacgcccggatgacacactaccaggccctgctgctggacaccgatcgcgtgcagtttggccctgtggtggccctgaatccagccaccctgctgcctctgccagaggagggcctgcagcacaactgtctggacatcctggcagaggcacacggaacaaggccagacctgaccgatcagcccctgcctgacgccgatcacacatggtataccgatggaagctccctgctgcaggagggccagaggaaggcaggagcagcagtgaccacagagacagaagtgatctgggccaaggccctgccagcaggcacatccgcccagcgggccgagctgatcgccctgacccaggccctgaagatggccgagggcaagaagctgaacgtgtacacagactccagatatgccttcgccaccgcacacatccacggagagatctacaggcgccggggctggctgacctctgagggcaaggagatcaagaacaaggatgagatcctggccctgctgaaggccctgtttctgcccaagcggctgagcatcatccactgtcctggacaccagaagggacactccgccgaggcaaggggcaatcggatggccgaccaggccgccagaaaggctgctattactgaaactcccgacacttccactctgctgattgaaaactcctccccttctggcggctcaaaaagaaccgccgacggcagcgaattcgagtctcccaagaagaagaggaaagtcggctctggccctgccgctaagagagtgaagctggactaatagtgagctggagcctcggtggccatgcttcttgccccttgggcctccccccagcccctcctccccttcctgcacccgtacccccgtggtctttgaataaagtctgagtgggcggcaaaaaaaaaaaaaaacaaaaaaaaaaaaaaaaaaaaaaaaaaaccaaaaaaaaaaaaaaaaaaaaaaaaaaaaaaaaaaaccccaaaaaaaaaaaaaaaaaaaaaaaaaaaaaaaaaaaaaaaaaaaaaa

SEQ ID NO: 1303 - RNA, 6155 nt, synthetic construct
  source 1..6155: mol_type = other RNA
aggaaataagagagaaaagaagagtaagaagaaatataagagccaccatgaaacggacagccgacggaagcgagttcgagtcaccaaagaagaagcggaaagtcagcgacctcgtgctgggcctcgacatcgggatcggaagcgtcggcgtgggaatcctgaacaaggtcaccggcgagatcatccacaagaacagtagaatcttccctgccgcccaggccgagaacaatgtggagcgcagaattaatagacagggcagaagactgaccagacggaagaagcacagaagagtgcggctgaaccatctgttcgaggagtccggactgatcaccgacttcacaaacgtgagcatcaacctgaacccttatcagctgagagtgaagggcctgaccgacgaactgagcaatgaggagctgttcatcgccctgaagaatatggtcaaacaccggggcatcagctacctggacgacgccagcgatgacggaaacagcagcgtgggcgactacgcccagatcgtgaaagagaacagcaagcagctggaaacaaagacccccggccagatccagctggagcggtaccagaagtacggccaactgcggggagacttcacagtggaagaagacggcaagaagcacagactgattaacgtcttccctaccagcgcctacagggccgaggccctgcggatactgcagacccagcaagagttcaaccctcagattaccgacgaattcatcaactcttacctgcagatcctgaccggaaagaggaagtactaccacggccccggcaacgaaaagagcagaacggattacggaagatacaccacaaagaaagatagcgaggacgagtacatcacgctggacaacatcttcggcatcctgatcggcaagtgcaccttctaccctgaggaatacagagccgccaaggccagctacaccgcccaggagtttaacctgctgaacgatctgaacaacctgacagtgcccaccgagacaaagaaactgtccgaggagcagaagaaccagattatcaccaacgtcaagaacgaaaaggccatgggacccgccaagctgttcaagtacatagccaagctcctgtcctgtgacgtggccgacatcaagggctaccgaatcgacaagtccgataaggccgagatccacaccttcgaggcctacagaaagatgaagaccctggcaacaatagacatagaacaaatggagagagagaacctggacaagctcgcatacgtgctcaccctgaacacagagaaggaaggaatacaggaggccctggagcatgaatttgctgacggaacctttagccaggagcaaatcgacgaactagtgcagttccggaaagccaactcaagcatctttggcaagggctggcacagcttcagcgtcaagctgatgatggagctgatccctgagctgtacgccaccagcgaggagcagatgacaatcctgaccagactgggcaagcaaaagacaaccagcagcagcaacaaaaccaagtacatcgacgagaagcagctgaccgaggaaatctacaatcccgtggccgccaaaagcgtgcgccaggccatcaaaatcgtgaacgccgccatcaaggaatacggcgacttcgacaacattgtgatcgaaatggcaagagagacaaacgaggacgatgaaaagaaggctatccagaaaatccagaaagccaataaggacgagaaagacgccgccatgctgaaggccgccaaccaatataacggcaaggccgagctgcctcacagtgtattccacggccacaagcagctggccaccaagatccggctgtggcaccagcagggcgagagatgcctgtatacaggtaaaaccatcagcatccacgacctgatcaacaacagcaaccagttcgaaatcgatcatatcctgcccctaagcatcacgttcgacgactccctggccaacaaagtgctggtgtacgctaccgcagcccaagagaaaggccagcggaccccttaccaggccctggacagcatggatgacgcctggtccttcagagagctaaaggccttcgtgcgggacagcaaagccctgagcaacaaaaagaaggagtacctgctgacagaggaggacatctccaagttcgacgtgagaaagaagttcatcgagcggaacctggtggacacccggtacgccagcagagtggtgctgaacgcgctacaggagcacttcagagtgcacaagacagacacaaaggtgtctgtggtgagaggccagttcacctcccagctgcggagacactggggcatcgagaaaacaagagacacctaccaccaccacgccgtggatgctctgatcatcgccgcaagcagccagctcaacctgtggaagaagcagaagaacacactggtgagctacagcgaagaccagctgctggacattgaaacgggcgaactgattagcgatgacgagtacaaggaaagcgtgtttaaagccccttaccagcactttgtcgacaccctgaagagtaaggagttcgaggacagcatcctgttctcctaccaagtggacagcaagttcaacagaaagatcagcgacgccaccatctacgccaccagacaggccaaagtgggcaaggacaagaaggacgagacatacgtgctgggcaagatcaaagacatttacagccagaccggatacgacgcctttataaagatatacaaaaaagacaagagcaagttcctgatgtacagacacgaccctcagaccttcgagaaggtgatcgaacctatcctggagaactaccctaacaaagaactgaatgaggtgaccgtgaagttcaagtacaagggcgaggagctggaggtggacatcagcaagatcaagaaggtctggcgggtgggcaagatgatctcctttacctatgacctgaacggcaagacaggcagaggcgccgtgtctgagaaggatgcccccaaggagctgctgcagatgctggagaagtccggcaagaagaagggcaaagaggtaccatgcaacccatttctgaaatacaaggaggaccacggctacatcagaaagtacagcaaaaaaggaaacggccccgaaatcaagagcctgaagtactacgatagcaagctgggcaatcacatagacatcacacccaagaactccaacaacaaggtcgttctgcagagcgtgtccccttggcgggctgacgtgtacttcaataagaccaccggcaaatacgaaatcctgggcctgaagtacgcggacctgaagttcgaaaagggcacaggcacatacaagatcagcgaggaaaagtacaacgacatcaaaatcaaggagggcgtggacagcgacagcgaattcaagttcaccctgtacaagaacgacctgctgctgatcaaggatacggaaacaaaggagcagcaactattccggttcctgagccggaccatgccaaatgtgaagcattacgtagaactgaaaccatacgataaacagaaattcgatgacaacgaggagctgatcaagatcctggggatcgtggccaagggaggccagtgcaagaagggcgtgtccaaaccaaacatcagcatctacaagatcagaaccgacgtgctgggcaaccagcacatcatcaagaacgaaggcgataagcccaagctggacttctccggcggaagctctggtggcagcaagcggaccgccgacggctctgaattcgagagccctaagaagaaaagaaaggtgagcggaggctctagcggcggaagcaccctgaacattgaagacgagtatagactgcatgaaacaagcaaggaacccgacgtgtccctgggctccacctggctgtccgactttccccaggcctgggccgagacaggaggaatgggcctggccgtgcggcaggcacccctgatcatccctctgaaggccacctctacacccgtgagcatcaagcagtaccctatgtctcaggaggccagactgggcatcaagcctcacatccagaggctgctggaccagggcatcctggtgccatgccagagcccctggaacacaccactgctgcccgtgaagaagccaggcaccaatgactatagacccgtgcaggatctgagagaggtgaacaagagggtggaggatatccaccccaccgtgcccaacccttacaatctgctgtccggcctgcccccttctcaccagtggtatacagtgctggacctgaaggatgccttcttttgtctgagactgcaccctaccagccagccactgttcgcctttgagtggagggaccctgagatgggcatctctggccagctgacctggacacgcctgcctcagggcttcaagaatagcccaacactgtttaacgaggccctgcaccgcgacctggcagatttccggatccagcacccagatctgatcctgctgcagtacgtggacgatctgctgctggccgccaccagcgagctggattgccagcagggaacacgcgccctgctgcagaccctgggaaacctgggatatagggcatccgccaagaaggcccagatctgtcagaagcaggtgaagtacctgggctatctgctgaaggagggccagagatggctgacagaggccaggaaggagacagtgatgggccagccaacacccaagaccccaagacagctgagggagttcctgggcaaagcaggattttgcaggctgttcatcccaggattcgcagagatggcagcacctctgtacccactgaccaagccgggcaccctgtttaattggggccctgaccagcagaaggcctatcaggagatcaagcaggccctgctgacagcaccagccctgggcctgccagacctgaccaagcctttcgagctgtttgtggatgagaagcagggctacgccaagggcgtgctgacccagaagctgggaccatggagacggcccgtggcctatctgtccaagaagctggacccagtggcagcaggatggccaccatgcctgaggatggtggcagcaatcgccgtgctgacaaaggatgccggcaagctgaccatgggacagccactggtcatcctggcaccacacgcagtggaggccctggtgaagcagcctccagatcgctggctgtctaacgcccggatgacacactaccaggccctgctgctggacaccgatcgcgtgcagtttggccctgtggtggccctgaatccagccaccctgctgcctctgccagaggagggcctgcagcacaactgtctggacatcctggcagaggcacacggaacaaggccagacctgaccgatcagcccctgcctgacgccgatcacacatggtataccgatggaagctccctgctgcaggagggccagaggaaggcaggagcagcagtgaccacagagacagaagtgatctgggccaaggccctgccagcaggcacatccgcccagcgggccgagctgatcgccctgacccaggccctgaagatggccgagggcaagaagctgaacgtgtacacagactccagatatgccttcgccaccgcacacatccacggagagatctacaggcgccggggctggctgacctctgagggcaaggagatcaagaacaaggatgagatcctggccctgctgaaggccctgtttctgcccaagcggctgagcatcatccactgtcctggacaccagaagggacactccgccgaggcaaggggcaatcggatggccgaccaggccgccagaaaggctgctattactgaaactcccgacacttccactctgctgattgaaaactcctccccttctggcggctcaaaaagaaccgccgacggcagcgaattcgagtctcccaagaagaagaggaaagtcggctctggccctgccgctaagagagtgaagctggactaatagtgagctggagcctcggtggccatgcttcttgccccttgggcctccccccagcccctcctccccttcctgcacccgtacccccgtggtctttgaataaagtctgagtgggcggcaaaaaaaaaaaaaaacaaaaaaaaaaaaaaaaaaaaaaaaaaaccaaaaaaaaaaaaaaaaaaaaaaaaaaaaaaaaaaaccccaaaaaaaaaaaaaaaaaaaaaaaaaaaaaaaaaaaaaaaaaaaaaa

SEQ ID NO: 1304 - RNA, 6215 nt, synthetic construct
  source 1..6215: mol_type = other RNA
aggaaataagagagaaaagaagagtaagaagaaatataagagccaccatgaaacggacagccgacggaagcgagttcgagtcaccaaagaagaagcggaaagtcagcgacctcgtgctgggcctcgacatcgggatcggaagcgtcggcgtgggaatcctgaacaaggtcaccggcgagatcatccacaagaacagtagaatcttccctgccgcccaggccgagaacaatgtggagcgcagaattaatagacagggcagaagactgaccagacggaagaagcacagaagagtgcggctgaaccatctgttcgaggagtccggactgatcaccgacttcacaaacgtgagcatcaacctgaacccttatcagctgagagtgaagggcctgaccgacgaactgagcaatgaggagctgttcatcgccctgaagaatatggtcaaacaccggggcatcagctacctggacgacgccagcgatgacggaaacagcagcgtgggcgactacgcccagatcgtgaaagagaacagcaagcagctggaaacaaagacccccggccagatccagctggagcggtaccagaagtacggccaactgcggggagacttcacagtggaagaagacggcaagaagcacagactgattaacgtcttccctaccagcgcctacagggccgaggccctgcggatactgcagacccagcaagagttcaaccctcagattaccgacgaattcatcaactcttacctgcagatcctgaccggaaagaggaagtactaccacggccccggcaacgaaaagagcagaacggattacggaagatacaccacaaagaaagatagcgaggacgagtacatcacgctggacaacatcttcggcatcctgatcggcaagtgcaccttctaccctgaggaatacagagccgccaaggccagctacaccgcccaggagtttaacctgctgaacgatctgaacaacctgacagtgcccaccgagacaaagaaactgtccgaggagcagaagaaccagattatcaccaacgtcaagaacgaaaaggccatgggacccgccaagctgttcaagtacatagccaagctcctgtcctgtgacgtggccgacatcaagggctaccgaatcgacaagtccgataaggccgagatccacaccttcgaggcctacagaaagatgaagaccctggcaacaatagacatagaacaaatggagagagagaacctggacaagctcgcatacgtgctcaccctgaacacagagaaggaaggaatacaggaggccctggagcatgaatttgctgacggaacctttagccaggagcaaatcgacgaactagtgcagttccggaaagccaactcaagcatctttggcaagggctggcacagcttcagcgtcaagctgatgatggagctgatccctgagctgtacgccaccagcgaggagcagatgacaatcctgaccagactgggcaagcaaaagacaaccagcagcagcaacaaaaccaagtacatcgacgagaagcagctgaccgaggaaatctacaatcccgtggccgccaaaagcgtgcgccaggccatcaaaatcgtgaacgccgccatcaaggaatacggcgacttcgacaacattgtgatcgaaatggcaagagagacaaacgaggacgatgaaaagaaggctatccagaaaatccagaaagccaataaggacgagaaagacgccgccatgctgaaggccgccaaccaatataacggcaaggccgagctgcctcacagtgtattccacggccacaagcagctggccaccaagatccggctgtggcaccagcagggcgagagatgcctgtatacaggtaaaaccatcagcatccacgacctgatcaacaacagcaaccagttcgaaatcgatcatatcctgcccctaagcatcacgttcgacgactccctggccaacaaagtgctggtgtacgctaccgcagcccaagagaaaggccagcggaccccttaccaggccctggacagcatggatgacgcctggtccttcagagagctaaaggccttcgtgcgggacagcaaagccctgagcaacaaaaagaaggagtacctgctgacagaggaggacatctccaagttcgacgtgagaaagaagttcatcgagcggaacctggtggacacccggtacgccagcagagtggtgctgaacgcgctacaggagcacttcagagtgcacaagacagacacaaaggtgtctgtggtgagaggccagttcacctcccagctgcggagacactggggcatcgagaaaacaagagacacctaccaccaccacgccgtggatgctctgatcatcgccgcaagcagccagctcaacctgtggaagaagcagaagaacacactggtgagctacagcgaagaccagctgctggacattgaaacgggcgaactgattagcgatgacgagtacaaggaaagcgtgtttaaagccccttaccagcactttgtcgacaccctgaagagtaaggagttcgaggacagcatcctgttctcctaccaagtggacagcaagttcaacagaaagatcagcgacgccaccatctacgccaccagacaggccaaagtgggcaaggacaagaaggacgagacatacgtgctgggcaagatcaaagacatttacagccagaccggatacgacgcctttataaagatatacaaaaaagacaagagcaagttcctgatgtacagacacgaccctcagaccttcgagaaggtgatcgaacctatcctggagaactaccctaacaaagaactgaatgagggaggaggaggaagcggaggaggaggatccgtgaccgtgaagttcaagtacaagggcgaggagctggaggtggacatctccaagatcaagaaggtctggcgggtgggcaagatgatctcttttacctatgacctgaacggcaagacaggcagaggcgccgtgagcgagaaggatgcccccaaggagctgctgcagatgctggagaagtccggcaagaagggaggaggaggatctggcggcggcggcagcaagggcaaagaggtaccatgcaacccatttctgaaatacaaggaggaccacggctacatcagaaagtacagcaaaaaaggaaacggccccgaaatcaagagcctgaagtactacgatagcaagctgggcaatcacatagacatcacacccaagaactccaacaacaaggtcgttctgcagagcgtgtccccttggcgggctgacgtgtacttcaataagaccaccggcaaatacgaaatcctgggcctgaagtacgcggacctgaagttcgaaaagggcacaggcacatacaagatcagcgaggaaaagtacaacgacatcaaaatcaaggagggcgtggacagcgacagcgaattcaagttcaccctgtacaagaacgacctgctgctgatcaaggatacggaaacaaaggagcagcaactattccggttcctgagccggaccatgccaaatgtgaagcattacgtagaactgaaaccatacgataaacagaaattcgatgacaacgaggagctgatcaagatcctggggatcgtggccaagggaggccagtgcaagaagggcgtgtccaaaccaaacatcagcatctacaagatcagaaccgacgtgctgggcaaccagcacatcatcaagaacgaaggcgataagcccaagctggacttctccggcggaagctctggtggcagcaagcggaccgccgacggctctgaattcgagagccctaagaagaaaagaaaggtgagcggaggctctagcggcggaagcaccctgaacattgaagacgagtatagactgcatgaaacaagcaaggaacccgacgtgtccctgggctccacctggctgtccgactttccccaggcctgggccgagacaggaggaatgggcctggccgtgcggcaggcacccctgatcatccctctgaaggccacctctacacccgtgagcatcaagcagtaccctatgtctcaggaggccagactgggcatcaagcctcacatccagaggctgctggaccagggcatcctggtgccatgccagagcccctggaacacaccactgctgcccgtgaagaagccaggcaccaatgactatagacccgtgcaggatctgagagaggtgaacaagagggtggaggatatccaccccaccgtgcccaacccttacaatctgctgtccggcctgcccccttctcaccagtggtatacagtgctggacctgaaggatgccttcttttgtctgagactgcaccctaccagccagccactgttcgcctttgagtggagggaccctgagatgggcatctctggccagctgacctggacacgcctgcctcagggcttcaagaatagcccaacactgtttaacgaggccctgcaccgcgacctggcagatttccggatccagcacccagatctgatcctgctgcagtacgtggacgatctgctgctggccgccaccagcgagctggattgccagcagggaacacgcgccctgctgcagaccctgggaaacctgggatatagggcatccgccaagaaggcccagatctgtcagaagcaggtgaagtacctgggctatctgctgaaggagggccagagatggctgacagaggccaggaaggagacagtgatgggccagccaacacccaagaccccaagacagctgagggagttcctgggcaaagcaggattttgcaggctgttcatcccaggattcgcagagatggcagcacctctgtacccactgaccaagccgggcaccctgtttaattggggccctgaccagcagaaggcctatcaggagatcaagcaggccctgctgacagcaccagccctgggcctgccagacctgaccaagcctttcgagctgtttgtggatgagaagcagggctacgccaagggcgtgctgacccagaagctgggaccatggagacggcccgtggcctatctgtccaagaagctggacccagtggcagcaggatggccaccatgcctgaggatggtggcagcaatcgccgtgctgacaaaggatgccggcaagctgaccatgggacagccactggtcatcctggcaccacacgcagtggaggccctggtgaagcagcctccagatcgctggctgtctaacgcccggatgacacactaccaggccctgctgctggacaccgatcgcgtgcagtttggccctgtggtggccctgaatccagccaccctgctgcctctgccagaggagggcctgcagcacaactgtctggacatcctggcagaggcacacggaacaaggccagacctgaccgatcagcccctgcctgacgccgatcacacatggtataccgatggaagctccctgctgcaggagggccagaggaaggcaggagcagcagtgaccacagagacagaagtgatctgggccaaggccctgccagcaggcacatccgcccagcgggccgagctgatcgccctgacccaggccctgaagatggccgagggcaagaagctgaacgtgtacacagactccagatatgccttcgccaccgcacacatccacggagagatctacaggcgccggggctggctgacctctgagggcaaggagatcaagaacaaggatgagatcctggccctgctgaaggccctgtttctgcccaagcggctgagcatcatccactgtcctggacaccagaagggacactccgccgaggcaaggggcaatcggatggccgaccaggccgccagaaaggctgctattactgaaactcccgacacttccactctgctgattgaaaactcctccccttctggcggctcaaaaagaaccgccgacggcagcgaattcgagtctcccaagaagaagaggaaagtcggctctggccctgccgctaagagagtgaagctggactaatagtgagctggagcctcggtggccatgcttcttgccccttgggcctccccccagcccctcctccccttcctgcacccgtacccccgtggtctttgaataaagtctgagtgggcggcaaaaaaaaaaaaaaacaaaaaaaaaaaaaaaaaaaaaaaaaaaccaaaaaaaaaaaaaaaaaaaaaaaaaaaaaaaaaaaccccaaaaaaaaaaaaaaaaaaaaaaaaaaaaaaaaaaaaaaaaaaaaaa

SEQ ID NO: 1305 - RNA, 6353 nt, synthetic construct
  source 1..6353: mol_type = other RNA
aggaaataagagagaaaagaagagtaagaagaaatataagagccaccatgaaacggacagccgacggaagcgagttcgagtcaccaaagaagaagcggaaagtcagcgacctcgtgctgggcctcgacatcgggatcggaagcgtcggcgtgggaatcctgaacaaggtcaccggcgagatcatccacaagaacagtagaatcttccctgccgcccaggccgagaacaatgtggagcgcagaattaatagacagggcagaagactgaccagacggaagaagcacagaagagtgcggctgaaccatctgttcgaggagtccggactgatcaccgacttcacaaacgtgagcatcaacctgaacccttatcagctgagagtgaagggcctgaccgacgaactgagcaatgaggagctgttcatcgccctgaagaatatggtcaaacaccggggcatcagctacctggacgacgccagcgatgacggaaacagcagcgtgggcgactacgcccagatcgtgaaagagaacagcaagcagctggaaacaaagacccccggccagatccagctggagcggtaccagaagtacggccaactgcggggagacttcacagtggaagaagacggcaagaagcacagactgattaacgtcttccctaccagcgcctacagggccgaggccctgcggatactgcagacccagcaagagttcaaccctcagattaccgacgaattcatcaactcttacctgcagatcctgaccggaaagaggaagtactaccacggccccggcaacgaaaagagcagaacggattacggaagatacaccacaaagaaagatagcgaggacgagtacatcacgctggacaacatcttcggcatcctgatcggcaagtgcaccttctaccctgaggaatacagagccgccaaggccagctacaccgcccaggagtttaacctgctgaacgatctgaacaacctgacagtgcccaccgagacaaagaaactgtccgaggagcagaagaaccagattatcaccaacgtcaagaacgaaaaggccatgggacccgccaagctgttcaagtacatagccaagctcctgtcctgtgacgtggccgacatcaagggctaccgaatcgacaagtccgataaggccgagatccacaccttcgaggcctacagaaagatgaagaccctggcaacaatagacatagaacaaatggagagagagaacctggacaagctcgcatacgtgctcaccctgaacacagagaaggaaggaatacaggaggccctggagcatgaatttgctgacggaacctttagccaggagcaaatcgacgaactagtgcagttccggaaagccaactcaagcatctttggcaagggctggcacagcttcagcgtcaagctgatgatggagctgatccctgagctgtacgccaccagcgaggagcagatgacaatcctgaccagactgggcaagcaaaagacaaccagcagcagcaacaaaaccaagtacatcgacgagaagcagctgaccgaggaaatctacaatcccgtggccgccaaaagcgtgcgccaggccatcaaaatcgtgaacgccgccatcaaggaatacggcgacttcgacaacattgtgatcgaaatggcaagagagacaaacgaggacgatgaaaagaaggctatccagaaaatccagaaagccaataaggacgagaaagacgccgccatgctgaaggccgccaaccaatataacggcaaggccgagctgcctcacagtgtattccacggccacaagcagctggccaccaagatccggctgtggcaccagcagggcgagagatgcctgtatacaggtaaaaccatcagcatccacgacctgatcaacaacagcaaccagttcgaaatcgatcatatcctgcccctaagcatcacgttcgacgactccctggccaacaaagtgctggtgtacgctaccgcagcccaagagaaaggccagcggaccccttaccaggccctggacagcatggatgacgcctggtccttcagagagctaaaggccttcgtgcgggacagcaaagccctgagcaacaaaaagaaggagtacctgctgacagaggaggacatctccaagttcgacgtgagaaagaagttcatcgagcggaacctggtggacacccggtacgccagcagagtggtgctgaacgcgctacaggagcacttcagagtgcacaagacagacacaaaggtgtctgtggtgagaggccagttcacctcccagctgcggagacactggggcatcgagaaaacaagagacacctaccaccaccacgccgtggatgctctgatcatcgccgcaagcagccagctcaacctgtggaagaagcagaagaacacactggtgagctacagcgaagaccagctgctggacattgaaacgggcgaactgattagcgatgacgagtacaaggaaagcgtgtttaaagccccttaccagcactttgtcgacaccctgaagagtaaggagttcgaggacagcatcctgttctcctaccaagtggacagcaagttcaacagaaagatcagcgacgccaccatctacgccaccagacaggccaaagtgggcaaggacaagaaggacgagacatacgtgctgggcaagatcaaagacatttacagccagaccggatacgacgcctttataaagatatacaaaaaagacaagagcaagttcctgatgtacagacacgaccctcagaccttcgagaaggtgatcgaacctatcctggagaactaccctaacaaagaactgaatgagtctggaggcagctccggaggctctagcggaagcgagacaccaggcacatctgagagcgccacccctgagtcctccggcggcagctccggcggctctagcgtgacagtgaagttcaagtacaagggcgaggagctggaggtggacatctccaagatcaagaaggtctggcgggtgggcaagatgatctcttttacctatgacctgaacggcaagacaggcagaggcgccgtgagcgagaaggatgcccccaaggagctgctgcagatgctggagaagtccggcaagaagtccggaggctcctctggcggcagctccggctctgagacacctggcacatccgagtctgccaccccagagtctagcggaggctcctctggaggcagctccaagggcaaagaggtaccatgcaacccatttctgaaatacaaggaggaccacggctacatcagaaagtacagcaaaaaaggaaacggccccgaaatcaagagcctgaagtactacgatagcaagctgggcaatcacatagacatcacacccaagaactccaacaacaaggtcgttctgcagagcgtgtccccttggcgggctgacgtgtacttcaataagaccaccggcaaatacgaaatcctgggcctgaagtacgcggacctgaagttcgaaaagggcacaggcacatacaagatcagcgaggaaaagtacaacgacatcaaaatcaaggagggcgtggacagcgacagcgaattcaagttcaccctgtacaagaacgacctgctgctgatcaaggatacggaaacaaaggagcagcaactattccggttcctgagccggaccatgccaaatgtgaagcattacgtagaactgaaaccatacgataaacagaaattcgatgacaacgaggagctgatcaagatcctggggatcgtggccaagggaggccagtgcaagaagggcgtgtccaaaccaaacatcagcatctacaagatcagaaccgacgtgctgggcaaccagcacatcatcaagaacgaaggcgataagcccaagctggacttctccggcggaagctctggtggcagcaagcggaccgccgacggctctgaattcgagagccctaagaagaaaagaaaggtgagcggaggctctagcggcggaagcaccctgaacattgaagacgagtatagactgcatgaaacaagcaaggaacccgacgtgtccctgggctccacctggctgtccgactttccccaggcctgggccgagacaggaggaatgggcctggccgtgcggcaggcacccctgatcatccctctgaaggccacctctacacccgtgagcatcaagcagtaccctatgtctcaggaggccagactgggcatcaagcctcacatccagaggctgctggaccagggcatcctggtgccatgccagagcccctggaacacaccactgctgcccgtgaagaagccaggcaccaatgactatagacccgtgcaggatctgagagaggtgaacaagagggtggaggatatccaccccaccgtgcccaacccttacaatctgctgtccggcctgcccccttctcaccagtggtatacagtgctggacctgaaggatgccttcttttgtctgagactgcaccctaccagccagccactgttcgcctttgagtggagggaccctgagatgggcatctctggccagctgacctggacacgcctgcctcagggcttcaagaatagcccaacactgtttaacgaggccctgcaccgcgacctggcagatttccggatccagcacccagatctgatcctgctgcagtacgtggacgatctgctgctggccgccaccagcgagctggattgccagcagggaacacgcgccctgctgcagaccctgggaaacctgggatatagggcatccgccaagaaggcccagatctgtcagaagcaggtgaagtacctgggctatctgctgaaggagggccagagatggctgacagaggccaggaaggagacagtgatgggccagccaacacccaagaccccaagacagctgagggagttcctgggcaaagcaggattttgcaggctgttcatcccaggattcgcagagatggcagcacctctgtacccactgaccaagccgggcaccctgtttaattggggccctgaccagcagaaggcctatcaggagatcaagcaggccctgctgacagcaccagccctgggcctgccagacctgaccaagcctttcgagctgtttgtggatgagaagcagggctacgccaagggcgtgctgacccagaagctgggaccatggagacggcccgtggcctatctgtccaagaagctggacccagtggcagcaggatggccaccatgcctgaggatggtggcagcaatcgccgtgctgacaaaggatgccggcaagctgaccatgggacagccactggtcatcctggcaccacacgcagtggaggccctggtgaagcagcctccagatcgctggctgtctaacgcccggatgacacactaccaggccctgctgctggacaccgatcgcgtgcagtttggccctgtggtggccctgaatccagccaccctgctgcctctgccagaggagggcctgcagcacaactgtctggacatcctggcagaggcacacggaacaaggccagacctgaccgatcagcccctgcctgacgccgatcacacatggtataccgatggaagctccctgctgcaggagggccagaggaaggcaggagcagcagtgaccacagagacagaagtgatctgggccaaggccctgccagcaggcacatccgcccagcgggccgagctgatcgccctgacccaggccctgaagatggccgagggcaagaagctgaacgtgtacacagactccagatatgccttcgccaccgcacacatccacggagagatctacaggcgccggggctggctgacctctgagggcaaggagatcaagaacaaggatgagatcctggccctgctgaaggccctgtttctgcccaagcggctgagcatcatccactgtcctggacaccagaagggacactccgccgaggcaaggggcaatcggatggccgaccaggccgccagaaaggctgctattactgaaactcccgacacttccactctgctgattgaaaactcctccccttctggcggctcaaaaagaaccgccgacggcagcgaattcgagtctcccaagaagaagaggaaagtcggctctggccctgccgctaagagagtgaagctggactaatagtgagctggagcctcggtggccatgcttcttgccccttgggcctccccccagcccctcctccccttcctgcacccgtacccccgtggtctttgaataaagtctgagtgggcggcaaaaaaaaaaaaaaacaaaaaaaaaaaaaaaaaaaaaaaaaaaccaaaaaaaaaaaaaaaaaaaaaaaaaaaaaaaaaaaccccaaaaaaaaaaaaaaaaaaaaaaaaaaaaaaaaaaaaaaaaaaaaaa

SEQ ID NO: 1306 - RNA, 6026 nt, synthetic construct
  source 1..6026: mol_type = other RNA
aggaaataagagagaaaagaagagtaagaagaaatataagagccaccatgaaacggacagccgacggaagcgagttcgagtcaccaaagaagaagcggaaagtcagcgacctcgtgctgggcctcgacatcgggatcggaagcgtcggcgtgggaatcctgaacaaggtcaccggcgagatcatccacaagaacagtagaatcttccctgccgcccaggccgagaacaatgtggagcgcagaattaatagacagggcagaagactgaccagacggaagaagcacagaagagtgcggctgaaccatctgttcgaggagtccggactgatcaccgacttcacaaacgtgagcatcaacctgaacccttatcagctgagagtgaagggcctgaccgacgaactgagcaatgaggagctgttcatcgccctgaagaatatggtcaaacaccggggcatcagctacctggacgacgccagcgatgacggaaacagcagcgtgggcgactacgcccagatcgtgaaagagaacagcaagcagctggaaacaaagacccccggccagatccagctggagcggtaccagaagtacggccaactgcggggagacttcacagtggaagaagacggcaagaagcacagactgattaacgtcttccctaccagcgcctacagggccgaggccctgcggatactgcagacccagcaagagttcaaccctcagattaccgacgaattcatcaactcttacctgcagatcctgaccggaaagaggaagtactaccacggccccggcaacgaaaagagcagaacggattacggaagatacaccacaaagaaagatagcgaggacgagtacatcacgctggacaacatcttcggcatcctgatcggcaagtgcaccttctaccctgaggaatacagagccgccaaggccagctacaccgcccaggagtttaacctgctgaacgatctgaacaacctgacagtgcccaccgagacaaagaaactgtccgaggagcagaagaaccagattatcaccaacgtcaagaacgaaaaggccatgggacccgccaagctgttcaagtacatagccaagctcctgtcctgtgacgtggccgacatcaagggctaccgaatcgacaagtccgataaggccgagatccacaccttcgaggcctacagaaagatgaagaccctggcaacaatagacatagaacaaatggagagagagaacctggacaagctcgcatacgtgctcaccctgaacacagagaaggaaggaatacaggaggccctggagcatgaatttgctgacggaacctttagccaggagcaaatcgacgaactagtgcagttccggaaagccaactcaagcatctttggcaagggctggcacagcttcagcgtcaagctgatgatggagctgatccctgagctgtacgccaccagcgaggagcagatgacaatcctgaccagactgggcaagcaaaagacaaccagcagcagcaacaaaaccaagtacatcgacgagaagcagctgaccgaggaaatctacaatcccgtggccgccaaaagcgtgcgccaggccatcaaaatcgtgaacgccgccatcaaggaatacggcgacttcgacaacattgtgatcgaaatggcaagagagacaaacgaggacgatgaaaagaaggctatccagaaaatccagaaagccaataaggacgagaaagacgccgccatgctgaaggccgccaaccaatataacggcaaggccgagctgcctcacagtgtattccacggccacaagcagctggccaccaagatccggctgtggcaccagcagggcgagagatgcctgtatacaggtaaaaccatcagcatccacgacctgatcaacaacagcaaccagttcgaaatcgatcatatcctgcccctaagcatcacgttcgacgactccctggccaacaaagtgctggtgtacgctaccgcagcccaagagaaaggccagcggaccccttaccaggccctggacagcatggatgacgcctggtccttcagagagctaaaggccttcgtgcgggacagcaaagccctgagcaacaaaaagaaggagtacctgctgacagaggaggacatctccaagttcgacgtgagaaagaagttcatcgagcggaacctggtggacacccggtacgccagcagagtggtgctgaacgcgctacaggagcacttcagagtgcacaagacagacacaaaggtgtctgtggtgagaggccagttcacctcccagctgcggagacactggggcatcgagaaaacaagagacacctaccaccaccacgccgtggatgctctgatcatcgccgcaagcagccagctcaacctgtggaagaagcagaagaacacactggtgagctacagcgaagaccagctgctggacattgaaacgggcgaactgattagcgatgacgagtacaaggaaagcgtgtttaaagccccttaccagcactttgtcgacaccctgaagagtaaggagttcgaggacagcatcctgttctcctaccaagtggacagcaagttcaacagaaagatcagcgacgccaccatctacgccaccagacaggccaaagtgggcaaggacaagaaggacgagacatacgtgctgggcaagatcaaagacatttacagccagaccggatacgacgcctttataaagatatacaaaaaagacaagagcaagttcctgatgtacagacacgaccctcagaccttcgagaaggtgatcgaacctatcctggagaactaccctaacaaagaactgaatgagaaccagatccggatgaagatcggcgtgatgttcggcaatcccgagacaacaaccggcggcaagggcaaagaggtaccatgcaacccatttctgaaatacaaggaggaccacggctacatcagaaagtacagcaaaaaaggaaacggccccgaaatcaagagcctgaagtactacgatagcaagctgggcaatcacatagacatcacacccaagaactccaacaacaaggtcgttctgcagagcgtgtccccttggcgggctgacgtgtacttcaataagaccaccggcaaatacgaaatcctgggcctgaagtacgcggacctgaagttcgaaaagggcacaggcacatacaagatcagcgaggaaaagtacaacgacatcaaaatcaaggagggcgtggacagcgacagcgaattcaagttcaccctgtacaagaacgacctgctgctgatcaaggatacggaaacaaaggagcagcaactattccggttcctgagccggaccatgccaaatgtgaagcattacgtagaactgaaaccatacgataaacagaaattcgatgacaacgaggagctgatcaagatcctggggatcgtggccaagggaggccagtgcaagaagggcgtgtccaaaccaaacatcagcatctacaagatcagaaccgacgtgctgggcaaccagcacatcatcaagaacgaaggcgataagcccaagctggacttctccggcggaagctctggtggcagcaagcggaccgccgacggctctgaattcgagagccctaagaagaaaagaaaggtgagcggaggctctagcggcggaagcaccctgaacattgaagacgagtatagactgcatgaaacaagcaaggaacccgacgtgtccctgggctccacctggctgtccgactttccccaggcctgggccgagacaggaggaatgggcctggccgtgcggcaggcacccctgatcatccctctgaaggccacctctacacccgtgagcatcaagcagtaccctatgtctcaggaggccagactgggcatcaagcctcacatccagaggctgctggaccagggcatcctggtgccatgccagagcccctggaacacaccactgctgcccgtgaagaagccaggcaccaatgactatagacccgtgcaggatctgagagaggtgaacaagagggtggaggatatccaccccaccgtgcccaacccttacaatctgctgtccggcctgcccccttctcaccagtggtatacagtgctggacctgaaggatgccttcttttgtctgagactgcaccctaccagccagccactgttcgcctttgagtggagggaccctgagatgggcatctctggccagctgacctggacacgcctgcctcagggcttcaagaatagcccaacactgtttaacgaggccctgcaccgcgacctggcagatttccggatccagcacccagatctgatcctgctgcagtacgtggacgatctgctgctggccgccaccagcgagctggattgccagcagggaacacgcgccctgctgcagaccctgggaaacctgggatatagggcatccgccaagaaggcccagatctgtcagaagcaggtgaagtacctgggctatctgctgaaggagggccagagatggctgacagaggccaggaaggagacagtgatgggccagccaacacccaagaccccaagacagctgagggagttcctgggcaaagcaggattttgcaggctgttcatcccaggattcgcagagatggcagcacctctgtacccactgaccaagccgggcaccctgtttaattggggccctgaccagcagaaggcctatcaggagatcaagcaggccctgctgacagcaccagccctgggcctgccagacctgaccaagcctttcgagctgtttgtggatgagaagcagggctacgccaagggcgtgctgacccagaagctgggaccatggagacggcccgtggcctatctgtccaagaagctggacccagtggcagcaggatggccaccatgcctgaggatggtggcagcaatcgccgtgctgacaaaggatgccggcaagctgaccatgggacagccactggtcatcctggcaccacacgcagtggaggccctggtgaagcagcctccagatcgctggctgtctaacgcccggatgacacactaccaggccctgctgctggacaccgatcgcgtgcagtttggccctgtggtggccctgaatccagccaccctgctgcctctgccagaggagggcctgcagcacaactgtctggacatcctggcagaggcacacggaacaaggccagacctgaccgatcagcccctgcctgacgccgatcacacatggtataccgatggaagctccctgctgcaggagggccagaggaaggcaggagcagcagtgaccacagagacagaagtgatctgggccaaggccctgccagcaggcacatccgcccagcgggccgagctgatcgccctgacccaggccctgaagatggccgagggcaagaagctgaacgtgtacacagactccagatatgccttcgccaccgcacacatccacggagagatctacaggcgccggggctggctgacctctgagggcaaggagatcaagaacaaggatgagatcctggccctgctgaaggccctgtttctgcccaagcggctgagcatcatccactgtcctggacaccagaagggacactccgccgaggcaaggggcaatcggatggccgaccaggccgccagaaaggctgctattactgaaactcccgacacttccactctgctgattgaaaactcctccccttctggcggctcaaaaagaaccgccgacggcagcgaattcgagtctcccaagaagaagaggaaagtcggctctggccctgccgctaagagagtgaagctggactaatagtgagctggagcctcggtggccatgcttcttgccccttgggcctccccccagcccctcctccccttcctgcacccgtacccccgtggtctttgaataaagtctgagtgggcggcaaaaaaaaaaaaaaacaaaaaaaaaaaaaaaaaaaaaaaaaaaccaaaaaaaaaaaaaaaaaaaaaaaaaaaaaaaaaaaccccaaaaaaaaaaaaaaaaaaaaaaaaaaaaaaaaaaaaaaaaaaaaaa

SEQ ID NO: 1307 - RNA, 6086 nt, synthetic construct
  source 1..6086: mol_type = other RNA
aggaaataagagagaaaagaagagtaagaagaaatataagagccaccatgaaacggacagccgacggaagcgagttcgagtcaccaaagaagaagcggaaagtcagcgacctcgtgctgggcctcgacatcgggatcggaagcgtcggcgtgggaatcctgaacaaggtcaccggcgagatcatccacaagaacagtagaatcttccctgccgcccaggccgagaacaatgtggagcgcagaattaatagacagggcagaagactgaccagacggaagaagcacagaagagtgcggctgaaccatctgttcgaggagtccggactgatcaccgacttcacaaacgtgagcatcaacctgaacccttatcagctgagagtgaagggcctgaccgacgaactgagcaatgaggagctgttcatcgccctgaagaatatggtcaaacaccggggcatcagctacctggacgacgccagcgatgacggaaacagcagcgtgggcgactacgcccagatcgtgaaagagaacagcaagcagctggaaacaaagacccccggccagatccagctggagcggtaccagaagtacggccaactgcggggagacttcacagtggaagaagacggcaagaagcacagactgattaacgtcttccctaccagcgcctacagggccgaggccctgcggatactgcagacccagcaagagttcaaccctcagattaccgacgaattcatcaactcttacctgcagatcctgaccggaaagaggaagtactaccacggccccggcaacgaaaagagcagaacggattacggaagatacaccacaaagaaagatagcgaggacgagtacatcacgctggacaacatcttcggcatcctgatcggcaagtgcaccttctaccctgaggaatacagagccgccaaggccagctacaccgcccaggagtttaacctgctgaacgatctgaacaacctgacagtgcccaccgagacaaagaaactgtccgaggagcagaagaaccagattatcaccaacgtcaagaacgaaaaggccatgggacccgccaagctgttcaagtacatagccaagctcctgtcctgtgacgtggccgacatcaagggctaccgaatcgacaagtccgataaggccgagatccacaccttcgaggcctacagaaagatgaagaccctggcaacaatagacatagaacaaatggagagagagaacctggacaagctcgcatacgtgctcaccctgaacacagagaaggaaggaatacaggaggccctggagcatgaatttgctgacggaacctttagccaggagcaaatcgacgaactagtgcagttccggaaagccaactcaagcatctttggcaagggctggcacagcttcagcgtcaagctgatgatggagctgatccctgagctgtacgccaccagcgaggagcagatgacaatcctgaccagactgggcaagcaaaagacaaccagcagcagcaacaaaaccaagtacatcgacgagaagcagctgaccgaggaaatctacaatcccgtggccgccaaaagcgtgcgccaggccatcaaaatcgtgaacgccgccatcaaggaatacggcgacttcgacaacattgtgatcgaaatggcaagagagacaaacgaggacgatgaaaagaaggctatccagaaaatccagaaagccaataaggacgagaaagacgccgccatgctgaaggccgccaaccaatataacggcaaggccgagctgcctcacagtgtattccacggccacaagcagctggccaccaagatccggctgtggcaccagcagggcgagagatgcctgtatacaggtaaaaccatcagcatccacgacctgatcaacaacagcaaccagttcgaaatcgatcatatcctgcccctaagcatcacgttcgacgactccctggccaacaaagtgctggtgtacgctaccgcagcccaagagaaaggccagcggaccccttaccaggccctggacagcatggatgacgcctggtccttcagagagctaaaggccttcgtgcgggacagcaaagccctgagcaacaaaaagaaggagtacctgctgacagaggaggacatctccaagttcgacgtgagaaagaagttcatcgagcggaacctggtggacacccggtacgccagcagagtggtgctgaacgcgctacaggagcacttcagagtgcacaagacagacacaaaggtgtctgtggtgagaggccagttcacctcccagctgcggagacactggggcatcgagaaaacaagagacacctaccaccaccacgccgtggatgctctgatcatcgccgcaagcagccagctcaacctgtggaagaagcagaagaacacactggtgagctacagcgaagaccagctgctggacattgaaacgggcgaactgattagcgatgacgagtacaaggaaagcgtgtttaaagccccttaccagcactttgtcgacaccctgaagagtaaggagttcgaggacagcatcctgttctcctaccaagtggacagcaagttcaacagaaagatcagcgacgccaccatctacgccaccagacaggccaaagtgggcaaggacaagaaggacgagacatacgtgctgggcaagatcaaagacatttacagccagaccggatacgacgcctttataaagatatacaaaaaagacaagagcaagttcctgatgtacagacacgaccctcagaccttcgagaaggtgatcgaacctatcctggagaactaccctaacaaagaactgaatgagggaggaggaggaagcggaggaggaggatccaaccagatccggatgaagatcggcgtgatgttcggcaatcccgagacaacaactggcggcggcggcggcggctctggcggcggcggcagcaagggcaaagaggtaccatgcaacccatttctgaaatacaaggaggaccacggctacatcagaaagtacagcaaaaaaggaaacggccccgaaatcaagagcctgaagtactacgatagcaagctgggcaatcacatagacatcacacccaagaactccaacaacaaggtcgttctgcagagcgtgtccccttggcgggctgacgtgtacttcaataagaccaccggcaaatacgaaatcctgggcctgaagtacgcggacctgaagttcgaaaagggcacaggcacatacaagatcagcgaggaaaagtacaacgacatcaaaatcaaggagggcgtggacagcgacagcgaattcaagttcaccctgtacaagaacgacctgctgctgatcaaggatacggaaacaaaggagcagcaactattccggttcctgagccggaccatgccaaatgtgaagcattacgtagaactgaaaccatacgataaacagaaattcgatgacaacgaggagctgatcaagatcctggggatcgtggccaagggaggccagtgcaagaagggcgtgtccaaaccaaacatcagcatctacaagatcagaaccgacgtgctgggcaaccagcacatcatcaagaacgaaggcgataagcccaagctggacttctccggcggaagctctggtggcagcaagcggaccgccgacggctctgaattcgagagccctaagaagaaaagaaaggtgagcggaggctctagcggcggaagcaccctgaacattgaagacgagtatagactgcatgaaacaagcaaggaacccgacgtgtccctgggctccacctggctgtccgactttccccaggcctgggccgagacaggaggaatgggcctggccgtgcggcaggcacccctgatcatccctctgaaggccacctctacacccgtgagcatcaagcagtaccctatgtctcaggaggccagactgggcatcaagcctcacatccagaggctgctggaccagggcatcctggtgccatgccagagcccctggaacacaccactgctgcccgtgaagaagccaggcaccaatgactatagacccgtgcaggatctgagagaggtgaacaagagggtggaggatatccaccccaccgtgcccaacccttacaatctgctgtccggcctgcccccttctcaccagtggtatacagtgctggacctgaaggatgccttcttttgtctgagactgcaccctaccagccagccactgttcgcctttgagtggagggaccctgagatgggcatctctggccagctgacctggacacgcctgcctcagggcttcaagaatagcccaacactgtttaacgaggccctgcaccgcgacctggcagatttccggatccagcacccagatctgatcctgctgcagtacgtggacgatctgctgctggccgccaccagcgagctggattgccagcagggaacacgcgccctgctgcagaccctgggaaacctgggatatagggcatccgccaagaaggcccagatctgtcagaagcaggtgaagtacctgggctatctgctgaaggagggccagagatggctgacagaggccaggaaggagacagtgatgggccagccaacacccaagaccccaagacagctgagggagttcctgggcaaagcaggattttgcaggctgttcatcccaggattcgcagagatggcagcacctctgtacccactgaccaagccgggcaccctgtttaattggggccctgaccagcagaaggcctatcaggagatcaagcaggccctgctgacagcaccagccctgggcctgccagacctgaccaagcctttcgagctgtttgtggatgagaagcagggctacgccaagggcgtgctgacccagaagctgggaccatggagacggcccgtggcctatctgtccaagaagctggacccagtggcagcaggatggccaccatgcctgaggatggtggcagcaatcgccgtgctgacaaaggatgccggcaagctgaccatgggacagccactggtcatcctggcaccacacgcagtggaggccctggtgaagcagcctccagatcgctggctgtctaacgcccggatgacacactaccaggccctgctgctggacaccgatcgcgtgcagtttggccctgtggtggccctgaatccagccaccctgctgcctctgccagaggagggcctgcagcacaactgtctggacatcctggcagaggcacacggaacaaggccagacctgaccgatcagcccctgcctgacgccgatcacacatggtataccgatggaagctccctgctgcaggagggccagaggaaggcaggagcagcagtgaccacagagacagaagtgatctgggccaaggccctgccagcaggcacatccgcccagcgggccgagctgatcgccctgacccaggccctgaagatggccgagggcaagaagctgaacgtgtacacagactccagatatgccttcgccaccgcacacatccacggagagatctacaggcgccggggctggctgacctctgagggcaaggagatcaagaacaaggatgagatcctggccctgctgaaggccctgtttctgcccaagcggctgagcatcatccactgtcctggacaccagaagggacactccgccgaggcaaggggcaatcggatggccgaccaggccgccagaaaggctgctattactgaaactcccgacacttccactctgctgattgaaaactcctccccttctggcggctcaaaaagaaccgccgacggcagcgaattcgagtctcccaagaagaagaggaaagtcggctctggccctgccgctaagagagtgaagctggactaatagtgagctggagcctcggtggccatgcttcttgccccttgggcctccccccagcccctcctccccttcctgcacccgtacccccgtggtctttgaataaagtctgagtgggcggcaaaaaaaaaaaaaaacaaaaaaaaaaaaaaaaaaaaaaaaaaaccaaaaaaaaaaaaaaaaaaaaaaaaaaaaaaaaaaaccccaaaaaaaaaaaaaaaaaaaaaaaaaaaaaaaaaaaaaaaaaaaaaa

SEQ ID NO: 1308 - RNA, 6224 nt, synthetic construct
  source 1..6224: mol_type = other RNA
aggaaataagagagaaaagaagagtaagaagaaatataagagccaccatgaaacggacagccgacggaagcgagttcgagtcaccaaagaagaagcggaaagtcagcgacctcgtgctgggcctcgacatcgggatcggaagcgtcggcgtgggaatcctgaacaaggtcaccggcgagatcatccacaagaacagtagaatcttccctgccgcccaggccgagaacaatgtggagcgcagaattaatagacagggcagaagactgaccagacggaagaagcacagaagagtgcggctgaaccatctgttcgaggagtccggactgatcaccgacttcacaaacgtgagcatcaacctgaacccttatcagctgagagtgaagggcctgaccgacgaactgagcaatgaggagctgttcatcgccctgaagaatatggtcaaacaccggggcatcagctacctggacgacgccagcgatgacggaaacagcagcgtgggcgactacgcccagatcgtgaaagagaacagcaagcagctggaaacaaagacccccggccagatccagctggagcggtaccagaagtacggccaactgcggggagacttcacagtggaagaagacggcaagaagcacagactgattaacgtcttccctaccagcgcctacagggccgaggccctgcggatactgcagacccagcaagagttcaaccctcagattaccgacgaattcatcaactcttacctgcagatcctgaccggaaagaggaagtactaccacggccccggcaacgaaaagagcagaacggattacggaagatacaccacaaagaaagatagcgaggacgagtacatcacgctggacaacatcttcggcatcctgatcggcaagtgcaccttctaccctgaggaatacagagccgccaaggccagctacaccgcccaggagtttaacctgctgaacgatctgaacaacctgacagtgcccaccgagacaaagaaactgtccgaggagcagaagaaccagattatcaccaacgtcaagaacgaaaaggccatgggacccgccaagctgttcaagtacatagccaagctcctgtcctgtgacgtggccgacatcaagggctaccgaatcgacaagtccgataaggccgagatccacaccttcgaggcctacagaaagatgaagaccctggcaacaatagacatagaacaaatggagagagagaacctggacaagctcgcatacgtgctcaccctgaacacagagaaggaaggaatacaggaggccctggagcatgaatttgctgacggaacctttagccaggagcaaatcgacgaactagtgcagttccggaaagccaactcaagcatctttggcaagggctggcacagcttcagcgtcaagctgatgatggagctgatccctgagctgtacgccaccagcgaggagcagatgacaatcctgaccagactgggcaagcaaaagacaaccagcagcagcaacaaaaccaagtacatcgacgagaagcagctgaccgaggaaatctacaatcccgtggccgccaaaagcgtgcgccaggccatcaaaatcgtgaacgccgccatcaaggaatacggcgacttcgacaacattgtgatcgaaatggcaagagagacaaacgaggacgatgaaaagaaggctatccagaaaatccagaaagccaataaggacgagaaagacgccgccatgctgaaggccgccaaccaatataacggcaaggccgagctgcctcacagtgtattccacggccacaagcagctggccaccaagatccggctgtggcaccagcagggcgagagatgcctgtatacaggtaaaaccatcagcatccacgacctgatcaacaacagcaaccagttcgaaatcgatcatatcctgcccctaagcatcacgttcgacgactccctggccaacaaagtgctggtgtacgctaccgcagcccaagagaaaggccagcggaccccttaccaggccctggacagcatggatgacgcctggtccttcagagagctaaaggccttcgtgcgggacagcaaagccctgagcaacaaaaagaaggagtacctgctgacagaggaggacatctccaagttcgacgtgagaaagaagttcatcgagcggaacctggtggacacccggtacgccagcagagtggtgctgaacgcgctacaggagcacttcagagtgcacaagacagacacaaaggtgtctgtggtgagaggccagttcacctcccagctgcggagacactggggcatcgagaaaacaagagacacctaccaccaccacgccgtggatgctctgatcatcgccgcaagcagccagctcaacctgtggaagaagcagaagaacacactggtgagctacagcgaagaccagctgctggacattgaaacgggcgaactgattagcgatgacgagtacaaggaaagcgtgtttaaagccccttaccagcactttgtcgacaccctgaagagtaaggagttcgaggacagcatcctgttctcctaccaagtggacagcaagttcaacagaaagatcagcgacgccaccatctacgccaccagacaggccaaagtgggcaaggacaagaaggacgagacatacgtgctgggcaagatcaaagacatttacagccagaccggatacgacgcctttataaagatatacaaaaaagacaagagcaagttcctgatgtacagacacgaccctcagaccttcgagaaggtgatcgaacctatcctggagaactaccctaacaaagaactgaatgagagcggaggcagctccggaggctctagcggatccgagacaccaggcacctctgagagcgccacacctgagtcctctggcggcagctccggcggctctagcaaccagatccggatgaagatcggcgtgatgttcggcaatccagagacaacaaccggaggaagcggaggctcctctggaggcagctccggcagcgagacacctggcacctccgagtctgccaccccagagtcttccggcggctcctctggcggcagctccaagggcaaagaggtaccatgcaacccatttctgaaatacaaggaggaccacggctacatcagaaagtacagcaaaaaaggaaacggccccgaaatcaagagcctgaagtactacgatagcaagctgggcaatcacatagacatcacacccaagaactccaacaacaaggtcgttctgcagagcgtgtccccttggcgggctgacgtgtacttcaataagaccaccggcaaatacgaaatcctgggcctgaagtacgcggacctgaagttcgaaaagggcacaggcacatacaagatcagcgaggaaaagtacaacgacatcaaaatcaaggagggcgtggacagcgacagcgaattcaagttcaccctgtacaagaacgacctgctgctgatcaaggatacggaaacaaaggagcagcaactattccggttcctgagccggaccatgccaaatgtgaagcattacgtagaactgaaaccatacgataaacagaaattcgatgacaacgaggagctgatcaagatcctggggatcgtggccaagggaggccagtgcaagaagggcgtgtccaaaccaaacatcagcatctacaagatcagaaccgacgtgctgggcaaccagcacatcatcaagaacgaaggcgataagcccaagctggacttctccggcggaagctctggtggcagcaagcggaccgccgacggctctgaattcgagagccctaagaagaaaagaaaggtgagcggaggctctagcggcggaagcaccctgaacattgaagacgagtatagactgcatgaaacaagcaaggaacccgacgtgtccctgggctccacctggctgtccgactttccccaggcctgggccgagacaggaggaatgggcctggccgtgcggcaggcacccctgatcatccctctgaaggccacctctacacccgtgagcatcaagcagtaccctatgtctcaggaggccagactgggcatcaagcctcacatccagaggctgctggaccagggcatcctggtgccatgccagagcccctggaacacaccactgctgcccgtgaagaagccaggcaccaatgactatagacccgtgcaggatctgagagaggtgaacaagagggtggaggatatccaccccaccgtgcccaacccttacaatctgctgtccggcctgcccccttctcaccagtggtatacagtgctggacctgaaggatgccttcttttgtctgagactgcaccctaccagccagccactgttcgcctttgagtggagggaccctgagatgggcatctctggccagctgacctggacacgcctgcctcagggcttcaagaatagcccaacactgtttaacgaggccctgcaccgcgacctggcagatttccggatccagcacccagatctgatcctgctgcagtacgtggacgatctgctgctggccgccaccagcgagctggattgccagcagggaacacgcgccctgctgcagaccctgggaaacctgggatatagggcatccgccaagaaggcccagatctgtcagaagcaggtgaagtacctgggctatctgctgaaggagggccagagatggctgacagaggccaggaaggagacagtgatgggccagccaacacccaagaccccaagacagctgagggagttcctgggcaaagcaggattttgcaggctgttcatcccaggattcgcagagatggcagcacctctgtacccactgaccaagccgggcaccctgtttaattggggccctgaccagcagaaggcctatcaggagatcaagcaggccctgctgacagcaccagccctgggcctgccagacctgaccaagcctttcgagctgtttgtggatgagaagcagggctacgccaagggcgtgctgacccagaagctgggaccatggagacggcccgtggcctatctgtccaagaagctggacccagtggcagcaggatggccaccatgcctgaggatggtggcagcaatcgccgtgctgacaaaggatgccggcaagctgaccatgggacagccactggtcatcctggcaccacacgcagtggaggccctggtgaagcagcctccagatcgctggctgtctaacgcccggatgacacactaccaggccctgctgctggacaccgatcgcgtgcagtttggccctgtggtggccctgaatccagccaccctgctgcctctgccagaggagggcctgcagcacaactgtctggacatcctggcagaggcacacggaacaaggccagacctgaccgatcagcccctgcctgacgccgatcacacatggtataccgatggaagctccctgctgcaggagggccagaggaaggcaggagcagcagtgaccacagagacagaagtgatctgggccaaggccctgccagcaggcacatccgcccagcgggccgagctgatcgccctgacccaggccctgaagatggccgagggcaagaagctgaacgtgtacacagactccagatatgccttcgccaccgcacacatccacggagagatctacaggcgccggggctggctgacctctgagggcaaggagatcaagaacaaggatgagatcctggccctgctgaaggccctgtttctgcccaagcggctgagcatcatccactgtcctggacaccagaagggacactccgccgaggcaaggggcaatcggatggccgaccaggccgccagaaaggctgctattactgaaactcccgacacttccactctgctgattgaaaactcctccccttctggcggctcaaaaagaaccgccgacggcagcgaattcgagtctcccaagaagaagaggaaagtcggctctggccctgccgctaagagagtgaagctggactaatagtgagctggagcctcggtggccatgcttcttgccccttgggcctccccccagcccctcctccccttcctgcacccgtacccccgtggtctttgaataaagtctgagtgggcggcaaaaaaaaaaaaaaacaaaaaaaaaaaaaaaaaaaaaaaaaaaccaaaaaaaaaaaaaaaaaaaaaaaaaaaaaaaaaaaccccaaaaaaaaaaaaaaaaaaaaaaaaaaaaaaaaaaaaaaaaaaaaaa

SEQ ID NO: 1309 - RNA, 6155 nt, synthetic construct
  source 1..6155: mol_type = other RNA
aggaaataagagagaaaagaagagtaagaagaaatataagagccaccatggtgaccgtgaagttcaagtacaagggcgaggagctggaggtggacatcagcaagatcaagaaggtctggcgggtgggcaagatgatctcctttacctatgacctgaacggcaagacaggcagaggcgccgtgtctgagaaggatgcccccaaggagctgctgcagatgctggagaagtccggcaagaagaaacggacagccgacggaagcgagttcgagtcaccaaagaagaagcggaaagtcagcgacctcgtgctgggcctcgacatcgggatcggaagcgtcggcgtgggaatcctgaacaaggtcaccggcgagatcatccacaagaacagtagaatcttccctgccgcccaggccgagaacaatgtggagcgcagaattaatagacagggcagaagactgaccagacggaagaagcacagaagagtgcggctgaaccatctgttcgaggagtccggactgatcaccgacttcacaaacgtgagcatcaacctgaacccttatcagctgagagtgaagggcctgaccgacgaactgagcaatgaggagctgttcatcgccctgaagaatatggtcaaacaccggggcatcagctacctggacgacgccagcgatgacggaaacagcagcgtgggcgactacgcccagatcgtgaaagagaacagcaagcagctggaaacaaagacccccggccagatccagctggagcggtaccagaagtacggccaactgcggggagacttcacagtggaagaagacggcaagaagcacagactgattaacgtcttccctaccagcgcctacagggccgaggccctgcggatactgcagacccagcaagagttcaaccctcagattaccgacgaattcatcaactcttacctgcagatcctgaccggaaagaggaagtactaccacggccccggcaacgaaaagagcagaacggattacggaagatacaccacaaagaaagatagcgaggacgagtacatcacgctggacaacatcttcggcatcctgatcggcaagtgcaccttctaccctgaggaatacagagccgccaaggccagctacaccgcccaggagtttaacctgctgaacgatctgaacaacctgacagtgcccaccgagacaaagaaactgtccgaggagcagaagaaccagattatcaccaacgtcaagaacgaaaaggccatgggacccgccaagctgttcaagtacatagccaagctcctgtcctgtgacgtggccgacatcaagggctaccgaatcgacaagtccgataaggccgagatccacaccttcgaggcctacagaaagatgaagaccctggcaacaatagacatagaacaaatggagagagagaacctggacaagctcgcatacgtgctcaccctgaacacagagaaggaaggaatacaggaggccctggagcatgaatttgctgacggaacctttagccaggagcaaatcgacgaactagtgcagttccggaaagccaactcaagcatctttggcaagggctggcacagcttcagcgtcaagctgatgatggagctgatccctgagctgtacgccaccagcgaggagcagatgacaatcctgaccagactgggcaagcaaaagacaaccagcagcagcaacaaaaccaagtacatcgacgagaagcagctgaccgaggaaatctacaatcccgtggccgccaaaagcgtgcgccaggccatcaaaatcgtgaacgccgccatcaaggaatacggcgacttcgacaacattgtgatcgaaatggcaagagagacaaacgaggacgatgaaaagaaggctatccagaaaatccagaaagccaataaggacgagaaagacgccgccatgctgaaggccgccaaccaatataacggcaaggccgagctgcctcacagtgtattccacggccacaagcagctggccaccaagatccggctgtggcaccagcagggcgagagatgcctgtatacaggtaaaaccatcagcatccacgacctgatcaacaacagcaaccagttcgaaatcgatcatatcctgcccctaagcatcacgttcgacgactccctggccaacaaagtgctggtgtacgctaccgcagcccaagagaaaggccagcggaccccttaccaggccctggacagcatggatgacgcctggtccttcagagagctaaaggccttcgtgcgggacagcaaagccctgagcaacaaaaagaaggagtacctgctgacagaggaggacatctccaagttcgacgtgagaaagaagttcatcgagcggaacctggtggacacccggtacgccagcagagtggtgctgaacgcgctacaggagcacttcagagtgcacaagacagacacaaaggtgtctgtggtgagaggccagttcacctcccagctgcggagacactggggcatcgagaaaacaagagacacctaccaccaccacgccgtggatgctctgatcatcgccgcaagcagccagctcaacctgtggaagaagcagaagaacacactggtgagctacagcgaagaccagctgctggacattgaaacgggcgaactgattagcgatgacgagtacaaggaaagcgtgtttaaagccccttaccagcactttgtcgacaccctgaagagtaaggagttcgaggacagcatcctgttctcctaccaagtggacagcaagttcaacagaaagatcagcgacgccaccatctacgccaccagacaggccaaagtgggcaaggacaagaaggacgagacatacgtgctgggcaagatcaaagacatttacagccagaccggatacgacgcctttataaagatatacaaaaaagacaagagcaagttcctgatgtacagacacgaccctcagaccttcgagaaggtgatcgaacctatcctggagaactaccctaacaaagaactgaatgagaagggcaaagaggtaccatgcaacccatttctgaaatacaaggaggaccacggctacatcagaaagtacagcaaaaaaggaaacggccccgaaatcaagagcctgaagtactacgatagcaagctgggcaatcacatagacatcacacccaagaactccaacaacaaggtcgttctgcagagcgtgtccccttggcgggctgacgtgtacttcaataagaccaccggcaaatacgaaatcctgggcctgaagtacgcggacctgaagttcgaaaagggcacaggcacatacaagatcagcgaggaaaagtacaacgacatcaaaatcaaggagggcgtggacagcgacagcgaattcaagttcaccctgtacaagaacgacctgctgctgatcaaggatacggaaacaaaggagcagcaactattccggttcctgagccggaccatgccaaatgtgaagcattacgtagaactgaaaccatacgataaacagaaattcgatgacaacgaggagctgatcaagatcctggggatcgtggccaagggaggccagtgcaagaagggcgtgtccaaaccaaacatcagcatctacaagatcagaaccgacgtgctgggcaaccagcacatcatcaagaacgaaggcgataagcccaagctggacttctccggcggaagctctggtggcagcaagcggaccgccgacggctctgaattcgagagccctaagaagaaaagaaaggtgagcggaggctctagcggcggaagcaccctgaacattgaagacgagtatagactgcatgaaacaagcaaggaacccgacgtgtccctgggctccacctggctgtccgactttccccaggcctgggccgagacaggaggaatgggcctggccgtgcggcaggcacccctgatcatccctctgaaggccacctctacacccgtgagcatcaagcagtaccctatgtctcaggaggccagactgggcatcaagcctcacatccagaggctgctggaccagggcatcctggtgccatgccagagcccctggaacacaccactgctgcccgtgaagaagccaggcaccaatgactatagacccgtgcaggatctgagagaggtgaacaagagggtggaggatatccaccccaccgtgcccaacccttacaatctgctgtccggcctgcccccttctcaccagtggtatacagtgctggacctgaaggatgccttcttttgtctgagactgcaccctaccagccagccactgttcgcctttgagtggagggaccctgagatgggcatctctggccagctgacctggacacgcctgcctcagggcttcaagaatagcccaacactgtttaacgaggccctgcaccgcgacctggcagatttccggatccagcacccagatctgatcctgctgcagtacgtggacgatctgctgctggccgccaccagcgagctggattgccagcagggaacacgcgccctgctgcagaccctgggaaacctgggatatagggcatccgccaagaaggcccagatctgtcagaagcaggtgaagtacctgggctatctgctgaaggagggccagagatggctgacagaggccaggaaggagacagtgatgggccagccaacacccaagaccccaagacagctgagggagttcctgggcaaagcaggattttgcaggctgttcatcccaggattcgcagagatggcagcacctctgtacccactgaccaagccgggcaccctgtttaattggggccctgaccagcagaaggcctatcaggagatcaagcaggccctgctgacagcaccagccctgggcctgccagacctgaccaagcctttcgagctgtttgtggatgagaagcagggctacgccaagggcgtgctgacccagaagctgggaccatggagacggcccgtggcctatctgtccaagaagctggacccagtggcagcaggatggccaccatgcctgaggatggtggcagcaatcgccgtgctgacaaaggatgccggcaagctgaccatgggacagccactggtcatcctggcaccacacgcagtggaggccctggtgaagcagcctccagatcgctggctgtctaacgcccggatgacacactaccaggccctgctgctggacaccgatcgcgtgcagtttggccctgtggtggccctgaatccagccaccctgctgcctctgccagaggagggcctgcagcacaactgtctggacatcctggcagaggcacacggaacaaggccagacctgaccgatcagcccctgcctgacgccgatcacacatggtataccgatggaagctccctgctgcaggagggccagaggaaggcaggagcagcagtgaccacagagacagaagtgatctgggccaaggccctgccagcaggcacatccgcccagcgggccgagctgatcgccctgacccaggccctgaagatggccgagggcaagaagctgaacgtgtacacagactccagatatgccttcgccaccgcacacatccacggagagatctacaggcgccggggctggctgacctctgagggcaaggagatcaagaacaaggatgagatcctggccctgctgaaggccctgtttctgcccaagcggctgagcatcatccactgtcctggacaccagaagggacactccgccgaggcaaggggcaatcggatggccgaccaggccgccagaaaggctgctattactgaaactcccgacacttccactctgctgattgaaaactcctccccttctggcggctcaaaaagaaccgccgacggcagcgaattcgagtctcccaagaagaagaggaaagtcggctctggccctgccgctaagagagtgaagctggactaatagtgagctggagcctcggtggccatgcttcttgccccttgggcctccccccagcccctcctccccttcctgcacccgtacccccgtggtctttgaataaagtctgagtgggcggcaaaaaaaaaaaaaaacaaaaaaaaaaaaaaaaaaaaaaaaaaaccaaaaaaaaaaaaaaaaaaaaaaaaaaaaaaaaaaaccccaaaaaaaaaaaaaaaaaaaaaaaaaaaaaaaaaaaaaaaaaaaaaa

SEQ ID NO: 1310 - RNA, 6026 nt, synthetic construct
  source 1..6026: mol_type = other RNA
aggaaataagagagaaaagaagagtaagaagaaatataagagccaccatgaaccagatccggatgaagatcggcgtgatgttcggcaatcccgagacaacaaccggcggcaaacggacagccgacggaagcgagttcgagtcaccaaagaagaagcggaaagtcagcgacctcgtgctgggcctcgacatcgggatcggaagcgtcggcgtgggaatcctgaacaaggtcaccggcgagatcatccacaagaacagtagaatcttccctgccgcccaggccgagaacaatgtggagcgcagaattaatagacagggcagaagactgaccagacggaagaagcacagaagagtgcggctgaaccatctgttcgaggagtccggactgatcaccgacttcacaaacgtgagcatcaacctgaacccttatcagctgagagtgaagggcctgaccgacgaactgagcaatgaggagctgttcatcgccctgaagaatatggtcaaacaccggggcatcagctacctggacgacgccagcgatgacggaaacagcagcgtgggcgactacgcccagatcgtgaaagagaacagcaagcagctggaaacaaagacccccggccagatccagctggagcggtaccagaagtacggccaactgcggggagacttcacagtggaagaagacggcaagaagcacagactgattaacgtcttccctaccagcgcctacagggccgaggccctgcggatactgcagacccagcaagagttcaaccctcagattaccgacgaattcatcaactcttacctgcagatcctgaccggaaagaggaagtactaccacggccccggcaacgaaaagagcagaacggattacggaagatacaccacaaagaaagatagcgaggacgagtacatcacgctggacaacatcttcggcatcctgatcggcaagtgcaccttctaccctgaggaatacagagccgccaaggccagctacaccgcccaggagtttaacctgctgaacgatctgaacaacctgacagtgcccaccgagacaaagaaactgtccgaggagcagaagaaccagattatcaccaacgtcaagaacgaaaaggccatgggacccgccaagctgttcaagtacatagccaagctcctgtcctgtgacgtggccgacatcaagggctaccgaatcgacaagtccgataaggccgagatccacaccttcgaggcctacagaaagatgaagaccctggcaacaatagacatagaacaaatggagagagagaacctggacaagctcgcatacgtgctcaccctgaacacagagaaggaaggaatacaggaggccctggagcatgaatttgctgacggaacctttagccaggagcaaatcgacgaactagtgcagttccggaaagccaactcaagcatctttggcaagggctggcacagcttcagcgtcaagctgatgatggagctgatccctgagctgtacgccaccagcgaggagcagatgacaatcctgaccagactgggcaagcaaaagacaaccagcagcagcaacaaaaccaagtacatcgacgagaagcagctgaccgaggaaatctacaatcccgtggccgccaaaagcgtgcgccaggccatcaaaatcgtgaacgccgccatcaaggaatacggcgacttcgacaacattgtgatcgaaatggcaagagagacaaacgaggacgatgaaaagaaggctatccagaaaatccagaaagccaataaggacgagaaagacgccgccatgctgaaggccgccaaccaatataacggcaaggccgagctgcctcacagtgtattccacggccacaagcagctggccaccaagatccggctgtggcaccagcagggcgagagatgcctgtatacaggtaaaaccatcagcatccacgacctgatcaacaacagcaaccagttcgaaatcgatcatatcctgcccctaagcatcacgttcgacgactccctggccaacaaagtgctggtgtacgctaccgcagcccaagagaaaggccagcggaccccttaccaggccctggacagcatggatgacgcctggtccttcagagagctaaaggccttcgtgcgggacagcaaagccctgagcaacaaaaagaaggagtacctgctgacagaggaggacatctccaagttcgacgtgagaaagaagttcatcgagcggaacctggtggacacccggtacgccagcagagtggtgctgaacgcgctacaggagcacttcagagtgcacaagacagacacaaaggtgtctgtggtgagaggccagttcacctcccagctgcggagacactggggcatcgagaaaacaagagacacctaccaccaccacgccgtggatgctctgatcatcgccgcaagcagccagctcaacctgtggaagaagcagaagaacacactggtgagctacagcgaagaccagctgctggacattgaaacgggcgaactgattagcgatgacgagtacaaggaaagcgtgtttaaagccccttaccagcactttgtcgacaccctgaagagtaaggagttcgaggacagcatcctgttctcctaccaagtggacagcaagttcaacagaaagatcagcgacgccaccatctacgccaccagacaggccaaagtgggcaaggacaagaaggacgagacatacgtgctgggcaagatcaaagacatttacagccagaccggatacgacgcctttataaagatatacaaaaaagacaagagcaagttcctgatgtacagacacgaccctcagaccttcgagaaggtgatcgaacctatcctggagaactaccctaacaaagaactgaatgagaagggcaaagaggtaccatgcaacccatttctgaaatacaaggaggaccacggctacatcagaaagtacagcaaaaaaggaaacggccccgaaatcaagagcctgaagtactacgatagcaagctgggcaatcacatagacatcacacccaagaactccaacaacaaggtcgttctgcagagcgtgtccccttggcgggctgacgtgtacttcaataagaccaccggcaaatacgaaatcctgggcctgaagtacgcggacctgaagttcgaaaagggcacaggcacatacaagatcagcgaggaaaagtacaacgacatcaaaatcaaggagggcgtggacagcgacagcgaattcaagttcaccctgtacaagaacgacctgctgctgatcaaggatacggaaacaaaggagcagcaactattccggttcctgagccggaccatgccaaatgtgaagcattacgtagaactgaaaccatacgataaacagaaattcgatgacaacgaggagctgatcaagatcctggggatcgtggccaagggaggccagtgcaagaagggcgtgtccaaaccaaacatcagcatctacaagatcagaaccgacgtgctgggcaaccagcacatcatcaagaacgaaggcgataagcccaagctggacttctccggcggaagctctggtggcagcaagcggaccgccgacggctctgaattcgagagccctaagaagaaaagaaaggtgagcggaggctctagcggcggaagcaccctgaacattgaagacgagtatagactgcatgaaacaagcaaggaacccgacgtgtccctgggctccacctggctgtccgactttccccaggcctgggccgagacaggaggaatgggcctggccgtgcggcaggcacccctgatcatccctctgaaggccacctctacacccgtgagcatcaagcagtaccctatgtctcaggaggccagactgggcatcaagcctcacatccagaggctgctggaccagggcatcctggtgccatgccagagcccctggaacacaccactgctgcccgtgaagaagccaggcaccaatgactatagacccgtgcaggatctgagagaggtgaacaagagggtggaggatatccaccccaccgtgcccaacccttacaatctgctgtccggcctgcccccttctcaccagtggtatacagtgctggacctgaaggatgccttcttttgtctgagactgcaccctaccagccagccactgttcgcctttgagtggagggaccctgagatgggcatctctggccagctgacctggacacgcctgcctcagggcttcaagaatagcccaacactgtttaacgaggccctgcaccgcgacctggcagatttccggatccagcacccagatctgatcctgctgcagtacgtggacgatctgctgctggccgccaccagcgagctggattgccagcagggaacacgcgccctgctgcagaccctgggaaacctgggatatagggcatccgccaagaaggcccagatctgtcagaagcaggtgaagtacctgggctatctgctgaaggagggccagagatggctgacagaggccaggaaggagacagtgatgggccagccaacacccaagaccccaagacagctgagggagttcctgggcaaagcaggattttgcaggctgttcatcccaggattcgcagagatggcagcacctctgtacccactgaccaagccgggcaccctgtttaattggggccctgaccagcagaaggcctatcaggagatcaagcaggccctgctgacagcaccagccctgggcctgccagacctgaccaagcctttcgagctgtttgtggatgagaagcagggctacgccaagggcgtgctgacccagaagctgggaccatggagacggcccgtggcctatctgtccaagaagctggacccagtggcagcaggatggccaccatgcctgaggatggtggcagcaatcgccgtgctgacaaaggatgccggcaagctgaccatgggacagccactggtcatcctggcaccacacgcagtggaggccctggtgaagcagcctccagatcgctggctgtctaacgcccggatgacacactaccaggccctgctgctggacaccgatcgcgtgcagtttggccctgtggtggccctgaatccagccaccctgctgcctctgccagaggagggcctgcagcacaactgtctggacatcctggcagaggcacacggaacaaggccagacctgaccgatcagcccctgcctgacgccgatcacacatggtataccgatggaagctccctgctgcaggagggccagaggaaggcaggagcagcagtgaccacagagacagaagtgatctgggccaaggccctgccagcaggcacatccgcccagcgggccgagctgatcgccctgacccaggccctgaagatggccgagggcaagaagctgaacgtgtacacagactccagatatgccttcgccaccgcacacatccacggagagatctacaggcgccggggctggctgacctctgagggcaaggagatcaagaacaaggatgagatcctggccctgctgaaggccctgtttctgcccaagcggctgagcatcatccactgtcctggacaccagaagggacactccgccgaggcaaggggcaatcggatggccgaccaggccgccagaaaggctgctattactgaaactcccgacacttccactctgctgattgaaaactcctccccttctggcggctcaaaaagaaccgccgacggcagcgaattcgagtctcccaagaagaagaggaaagtcggctctggccctgccgctaagagagtgaagctggactaatagtgagctggagcctcggtggccatgcttcttgccccttgggcctccccccagcccctcctccccttcctgcacccgtacccccgtggtctttgaataaagtctgagtgggcggcaaaaaaaaaaaaaaacaaaaaaaaaaaaaaaaaaaaaaaaaaaccaaaaaaaaaaaaaaaaaaaaaaaaaaaaaaaaaaaccccaaaaaaaaaaaaaaaaaaaaaaaaaaaaaaaaaaaaaaaaaaaaaa

SEQ ID NO: 1311 - RNA, 6155 nt, synthetic construct
  source 1..6155: mol_type = other RNA
aggaaataagagagaaaagaagagtaagaagaaatataagagccaccatgaaacggacagccgacggaagcgagttcgagtcaccaaagaagaagcggaaagtcagcgacctcgtgctgggcctcgacatcgggatcggaagcgtcggcgtgggaatcctgaacaaggtcaccggcgagatcatccacaagaacagtagaatcttccctgccgcccaggccgagaacaatgtggagcgcagaattaatagacagggcagaagactgaccagacggaagaagcacagaagagtgcggctgaaccatctgttcgaggagtccggactgatcaccgacttcacaaacgtgagcatcaacctgaacccttatcagctgagagtgaagggcctgaccgacgaactgagcaatgaggagctgttcatcgccctgaagaatatggtcaaacaccggggcatcagctacctggacgacgccagcgatgacggaaacagcagcgtgggcgactacgcccagatcgtgaaagagaacagcaagcagctggaaacaaagacccccggccagatccagctggagcggtaccagaagtacggccaactgcggggagacttcacagtggaagaagacggcaagaagcacagactgattaacgtcttccctaccagcgcctacagggccgaggccctgcggatactgcagacccagcaagagttcaaccctcagattaccgacgaattcatcaactcttacctgcagatcctgaccggaaagaggaagtactaccacggccccggcaacgaaaagagcagaacggattacggaagatacaccacaaagaaagatagcgaggacgagtacatcacgctggacaacatcttcggcatcctgatcggcaagtgcaccttctaccctgaggaatacagagccgccaaggccagctacaccgcccaggagtttaacctgctgaacgatctgaacaacctgacagtgcccaccgagacaaagaaactgtccgaggagcagaagaaccagattatcaccaacgtcaagaacgaaaaggccatgggacccgccaagctgttcaagtacatagccaagctcctgtcctgtgacgtggccgacatcaagggctaccgaatcgacaagtccgataaggccgagatccacaccttcgaggcctacagaaagatgaagaccctggcaacaatagacatagaacaaatggagagagagaacctggacaagctcgcatacgtgctcaccctgaacacagagaaggaaggaatacaggaggccctggagcatgaatttgctgacggaacctttagccaggagcaaatcgacgaactagtgcagttccggaaagccaactcaagcatctttggcaagggctggcacagcttcagcgtcaagctgatgatggagctgatccctgagctgtacgccaccagcgaggagcagatgacaatcctgaccagactgggcaagcaaaagacaaccagcagcagcaacaaaaccaagtacatcgacgagaagcagctgaccgaggaaatctacaatcccgtggccgccaaaagcgtgcgccaggccatcaaaatcgtgaacgccgccatcaaggaatacggcgacttcgacaacattgtgatcgaaatggcaagagagacaaacgaggacgatgaaaagaaggctatccagaaaatccagaaagccaataaggacgagaaagacgccgccatgctgaaggccgccaaccaatataacggcaaggccgagctgcctcacagtgtattccacggccacaagcagctggccaccaagatccggctgtggcaccagcagggcgagagatgcctgtatacaggtaaaaccatcagcatccacgacctgatcaacaacagcaaccagttcgaaatcgatcatatcctgcccctaagcatcacgttcgacgactccctggccaacaaagtgctggtgtacgctaccgcagcccaagagaaaggccagcggaccccttaccaggccctggacagcatggatgacgcctggtccttcagagagctaaaggccttcgtgcgggacagcaaagccctgagcaacaaaaagaaggagtacctgctgacagaggaggacatctccaagttcgacgtgagaaagaagttcatcgagcggaacctggtggacacccggtacgccagcagagtggtgctgaacgcgctacaggagcacttcagagtgcacaagacagacacaaaggtgtctgtggtgagaggccagttcacctcccagctgcggagacactggggcatcgagaaaacaagagacacctaccaccaccacgccgtggatgctctgatcatcgccgcaagcagccagctcaacctgtggaagaagcagaagaacacactggtgagctacagcgaagaccagctgctggacattgaaacgggcgaactgattagcgatgacgagtacaaggaaagcgtgtttaaagccccttaccagcactttgtcgacaccctgaagagtaaggagttcgaggacagcatcctgttctcctaccaagtggacagcaagttcaacagaaagatcagcgacgccaccatctacgccaccagacaggccaaagtgggcaaggacaagaaggacgagacatacgtgctgggcaagatcaaagacatttacagccagaccggatacgacgcctttataaagatatacaaaaaagacaagagcaagttcctgatgtacagacacgaccctcagaccttcgagaaggtgatcgaacctatcctggagaactaccctaacaaagaactgaatgagaagggcaaagaggtaccatgcaacccatttctgaaatacaaggaggaccacggctacatcagaaagtacagcaaaaaaggaaacggccccgaaatcaagagcctgaagtactacgatagcaagctgggcaatcacatagacatcacacccaagaactccaacaacaaggtcgttctgcagagcgtgtccccttggcgggctgacgtgtacttcaataagaccaccggcaaatacgaaatcctgggcctgaagtacgcggacctgaagttcgaaaagggcacaggcacatacaagatcagcgaggaaaagtacaacgacatcaaaatcaaggagggcgtggacagcgacagcgaattcaagttcaccctgtacaagaacgacctgctgctgatcaaggatacggaaacaaaggagcagcaactattccggttcctgagccggaccatgccaaatgtgaagcattacgtagaactgaaaccatacgataaacagaaattcgatgacaacgaggagctgatcaagatcctggggatcgtggccaagggaggccagtgcaagaagggcgtgtccaaaccaaacatcagcatctacaagatcagaaccgacgtgctgggcaaccagcacatcatcaagaacgaaggcgataagcccaagctggacttctccggcggaagctctggtggcagcaagcggaccgccgacggctctgaattcgagagccctaagaagaaaagaaaggtgagcggaggctctagcggcggaagcaccctgaacattgaagacgagtatagactgcatgaaacaagcaaggaacccgacgtgtccctgggctccacctggctgtccgactttccccaggcctgggccgagacaggaggaatgggcctggccgtgcggcaggcacccctgatcatccctctgaaggccacctctacacccgtgagcatcaagcagtaccctatgtctcaggaggccagactgggcatcaagcctcacatccagaggctgctggaccagggcatcctggtgccatgccagagcccctggaacacaccactgctgcccgtgaagaagccaggcaccaatgactatagacccgtgcaggatctgagagaggtgaacaagagggtggaggatatccaccccaccgtgcccaacccttacaatctgctgtccggcctgcccccttctcaccagtggtatacagtgctggacctgaaggatgccttcttttgtctgagactgcaccctaccagccagccactgttcgcctttgagtggagggaccctgagatgggcatctctggccagctgacctggacacgcctgcctcagggcttcaagaatagcccaacactgtttaacgaggccctgcaccgcgacctggcagatttccggatccagcacccagatctgatcctgctgcagtacgtggacgatctgctgctggccgccaccagcgagctggattgccagcagggaacacgcgccctgctgcagaccctgggaaacctgggatatagggcatccgccaagaaggcccagatctgtcagaagcaggtgaagtacctgggctatctgctgaaggagggccagagatggctgacagaggccaggaaggagacagtgatgggccagccaacacccaagaccccaagacagctgagggagttcctgggcaaagcaggattttgcaggctgttcatcccaggattcgcagagatggcagcacctctgtacccactgaccaagccgggcaccctgtttaattggggccctgaccagcagaaggcctatcaggagatcaagcaggccctgctgacagcaccagccctgggcctgccagacctgaccaagcctttcgagctgtttgtggatgagaagcagggctacgccaagggcgtgctgacccagaagctgggaccatggagacggcccgtggcctatctgtccaagaagctggacccagtggcagcaggatggccaccatgcctgaggatggtggcagcaatcgccgtgctgacaaaggatgccggcaagctgaccatgggacagccactggtcatcctggcaccacacgcagtggaggccctggtgaagcagcctccagatcgctggctgtctaacgcccggatgacacactaccaggccctgctgctggacaccgatcgcgtgcagtttggccctgtggtggccctgaatccagccaccctgctgcctctgccagaggagggcctgcagcacaactgtctggacatcctggcagaggcacacggaacaaggccagacctgaccgatcagcccctgcctgacgccgatcacacatggtataccgatggaagctccctgctgcaggagggccagaggaaggcaggagcagcagtgaccacagagacagaagtgatctgggccaaggccctgccagcaggcacatccgcccagcgggccgagctgatcgccctgacccaggccctgaagatggccgagggcaagaagctgaacgtgtacacagactccagatatgccttcgccaccgcacacatccacggagagatctacaggcgccggggctggctgacctctgagggcaaggagatcaagaacaaggatgagatcctggccctgctgaaggccctgtttctgcccaagcggctgagcatcatccactgtcctggacaccagaagggacactccgccgaggcaaggggcaatcggatggccgaccaggccgccagaaaggctgctattactgaaactcccgacacttccactctgctgattgaaaactcctccccttctggcggctcaaaaagaaccgccgacggcagcgaattcgagtctcccaagaagaagaggaaagtcggctctggccctgccgctaagagagtgaagctggacgtgaccgtgaagttcaagtacaagggcgaggagctggaggtggacatcagcaagatcaagaaggtctggcgggtgggcaagatgatctcctttacctatgacctgaacggcaagacaggcagaggcgccgtgtctgagaaggatgcccccaaggagctgctgcagatgctggagaagtccggcaagaagtaatagtgagctggagcctcggtggccatgcttcttgccccttgggcctccccccagcccctcctccccttcctgcacccgtacccccgtggtctttgaataaagtctgagtgggcggcaaaaaaaaaaaaaaacaaaaaaaaaaaaaaaaaaaaaaaaaaaccaaaaaaaaaaaaaaaaaaaaaaaaaaaaaaaaaaaccccaaaaaaaaaaaaaaaaaaaaaaaaaaaaaaaaaaaaaaaaaaaaaa

SEQ ID NO: 1312 - RNA, 6026 nt, synthetic construct
  source 1..6026: mol_type = other RNA
aggaaataagagagaaaagaagagtaagaagaaatataagagccaccatgaaacggacagccgacggaagcgagttcgagtcaccaaagaagaagcggaaagtcagcgacctcgtgctgggcctcgacatcgggatcggaagcgtcggcgtgggaatcctgaacaaggtcaccggcgagatcatccacaagaacagtagaatcttccctgccgcccaggccgagaacaatgtggagcgcagaattaatagacagggcagaagactgaccagacggaagaagcacagaagagtgcggctgaaccatctgttcgaggagtccggactgatcaccgacttcacaaacgtgagcatcaacctgaacccttatcagctgagagtgaagggcctgaccgacgaactgagcaatgaggagctgttcatcgccctgaagaatatggtcaaacaccggggcatcagctacctggacgacgccagcgatgacggaaacagcagcgtgggcgactacgcccagatcgtgaaagagaacagcaagcagctggaaacaaagacccccggccagatccagctggagcggtaccagaagtacggccaactgcggggagacttcacagtggaagaagacggcaagaagcacagactgattaacgtcttccctaccagcgcctacagggccgaggccctgcggatactgcagacccagcaagagttcaaccctcagattaccgacgaattcatcaactcttacctgcagatcctgaccggaaagaggaagtactaccacggccccggcaacgaaaagagcagaacggattacggaagatacaccacaaagaaagatagcgaggacgagtacatcacgctggacaacatcttcggcatcctgatcggcaagtgcaccttctaccctgaggaatacagagccgccaaggccagctacaccgcccaggagtttaacctgctgaacgatctgaacaacctgacagtgcccaccgagacaaagaaactgtccgaggagcagaagaaccagattatcaccaacgtcaagaacgaaaaggccatgggacccgccaagctgttcaagtacatagccaagctcctgtcctgtgacgtggccgacatcaagggctaccgaatcgacaagtccgataaggccgagatccacaccttcgaggcctacagaaagatgaagaccctggcaacaatagacatagaacaaatggagagagagaacctggacaagctcgcatacgtgctcaccctgaacacagagaaggaaggaatacaggaggccctggagcatgaatttgctgacggaacctttagccaggagcaaatcgacgaactagtgcagttccggaaagccaactcaagcatctttggcaagggctggcacagcttcagcgtcaagctgatgatggagctgatccctgagctgtacgccaccagcgaggagcagatgacaatcctgaccagactgggcaagcaaaagacaaccagcagcagcaacaaaaccaagtacatcgacgagaagcagctgaccgaggaaatctacaatcccgtggccgccaaaagcgtgcgccaggccatcaaaatcgtgaacgccgccatcaaggaatacggcgacttcgacaacattgtgatcgaaatggcaagagagacaaacgaggacgatgaaaagaaggctatccagaaaatccagaaagccaataaggacgagaaagacgccgccatgctgaaggccgccaaccaatataacggcaaggccgagctgcctcacagtgtattccacggccacaagcagctggccaccaagatccggctgtggcaccagcagggcgagagatgcctgtatacaggtaaaaccatcagcatccacgacctgatcaacaacagcaaccagttcgaaatcgatcatatcctgcccctaagcatcacgttcgacgactccctggccaacaaagtgctggtgtacgctaccgcagcccaagagaaaggccagcggaccccttaccaggccctggacagcatggatgacgcctggtccttcagagagctaaaggccttcgtgcgggacagcaaagccctgagcaacaaaaagaaggagtacctgctgacagaggaggacatctccaagttcgacgtgagaaagaagttcatcgagcggaacctggtggacacccggtacgccagcagagtggtgctgaacgcgctacaggagcacttcagagtgcacaagacagacacaaaggtgtctgtggtgagaggccagttcacctcccagctgcggagacactggggcatcgagaaaacaagagacacctaccaccaccacgccgtggatgctctgatcatcgccgcaagcagccagctcaacctgtggaagaagcagaagaacacactggtgagctacagcgaagaccagctgctggacattgaaacgggcgaactgattagcgatgacgagtacaaggaaagcgtgtttaaagccccttaccagcactttgtcgacaccctgaagagtaaggagttcgaggacagcatcctgttctcctaccaagtggacagcaagttcaacagaaagatcagcgacgccaccatctacgccaccagacaggccaaagtgggcaaggacaagaaggacgagacatacgtgctgggcaagatcaaagacatttacagccagaccggatacgacgcctttataaagatatacaaaaaagacaagagcaagttcctgatgtacagacacgaccctcagaccttcgagaaggtgatcgaacctatcctggagaactaccctaacaaagaactgaatgagaagggcaaagaggtaccatgcaacccatttctgaaatacaaggaggaccacggctacatcagaaagtacagcaaaaaaggaaacggccccgaaatcaagagcctgaagtactacgatagcaagctgggcaatcacatagacatcacacccaagaactccaacaacaaggtcgttctgcagagcgtgtccccttggcgggctgacgtgtacttcaataagaccaccggcaaatacgaaatcctgggcctgaagtacgcggacctgaagttcgaaaagggcacaggcacatacaagatcagcgaggaaaagtacaacgacatcaaaatcaaggagggcgtggacagcgacagcgaattcaagttcaccctgtacaagaacgacctgctgctgatcaaggatacggaaacaaaggagcagcaactattccggttcctgagccggaccatgccaaatgtgaagcattacgtagaactgaaaccatacgataaacagaaattcgatgacaacgaggagctgatcaagatcctggggatcgtggccaagggaggccagtgcaagaagggcgtgtccaaaccaaacatcagcatctacaagatcagaaccgacgtgctgggcaaccagcacatcatcaagaacgaaggcgataagcccaagctggacttctccggcggaagctctggtggcagcaagcggaccgccgacggctctgaattcgagagccctaagaagaaaagaaaggtgagcggaggctctagcggcggaagcaccctgaacattgaagacgagtatagactgcatgaaacaagcaaggaacccgacgtgtccctgggctccacctggctgtccgactttccccaggcctgggccgagacaggaggaatgggcctggccgtgcggcaggcacccctgatcatccctctgaaggccacctctacacccgtgagcatcaagcagtaccctatgtctcaggaggccagactgggcatcaagcctcacatccagaggctgctggaccagggcatcctggtgccatgccagagcccctggaacacaccactgctgcccgtgaagaagccaggcaccaatgactatagacccgtgcaggatctgagagaggtgaacaagagggtggaggatatccaccccaccgtgcccaacccttacaatctgctgtccggcctgcccccttctcaccagtggtatacagtgctggacctgaaggatgccttcttttgtctgagactgcaccctaccagccagccactgttcgcctttgagtggagggaccctgagatgggcatctctggccagctgacctggacacgcctgcctcagggcttcaagaatagcccaacactgtttaacgaggccctgcaccgcgacctggcagatttccggatccagcacccagatctgatcctgctgcagtacgtggacgatctgctgctggccgccaccagcgagctggattgccagcagggaacacgcgccctgctgcagaccctgggaaacctgggatatagggcatccgccaagaaggcccagatctgtcagaagcaggtgaagtacctgggctatctgctgaaggagggccagagatggctgacagaggccaggaaggagacagtgatgggccagccaacacccaagaccccaagacagctgagggagttcctgggcaaagcaggattttgcaggctgttcatcccaggattcgcagagatggcagcacctctgtacccactgaccaagccgggcaccctgtttaattggggccctgaccagcagaaggcctatcaggagatcaagcaggccctgctgacagcaccagccctgggcctgccagacctgaccaagcctttcgagctgtttgtggatgagaagcagggctacgccaagggcgtgctgacccagaagctgggaccatggagacggcccgtggcctatctgtccaagaagctggacccagtggcagcaggatggccaccatgcctgaggatggtggcagcaatcgccgtgctgacaaaggatgccggcaagctgaccatgggacagccactggtcatcctggcaccacacgcagtggaggccctggtgaagcagcctccagatcgctggctgtctaacgcccggatgacacactaccaggccctgctgctggacaccgatcgcgtgcagtttggccctgtggtggccctgaatccagccaccctgctgcctctgccagaggagggcctgcagcacaactgtctggacatcctggcagaggcacacggaacaaggccagacctgaccgatcagcccctgcctgacgccgatcacacatggtataccgatggaagctccctgctgcaggagggccagaggaaggcaggagcagcagtgaccacagagacagaagtgatctgggccaaggccctgccagcaggcacatccgcccagcgggccgagctgatcgccctgacccaggccctgaagatggccgagggcaagaagctgaacgtgtacacagactccagatatgccttcgccaccgcacacatccacggagagatctacaggcgccggggctggctgacctctgagggcaaggagatcaagaacaaggatgagatcctggccctgctgaaggccctgtttctgcccaagcggctgagcatcatccactgtcctggacaccagaagggacactccgccgaggcaaggggcaatcggatggccgaccaggccgccagaaaggctgctattactgaaactcccgacacttccactctgctgattgaaaactcctccccttctggcggctcaaaaagaaccgccgacggcagcgaattcgagtctcccaagaagaagaggaaagtcggctctggccctgccgctaagagagtgaagctggacaaccagatccggatgaagatcggcgtgatgttcggcaatcccgagacaacaaccggcggctaatagtgagctggagcctcggtggccatgcttcttgccccttgggcctccccccagcccctcctccccttcctgcacccgtacccccgtggtctttgaataaagtctgagtgggcggcaaaaaaaaaaaaaaacaaaaaaaaaaaaaaaaaaaaaaaaaaaccaaaaaaaaaaaaaaaaaaaaaaaaaaaaaaaaaaaccccaaaaaaaaaaaaaaaaaaaaaaaaaaaaaaaaaaaaaaaaaaaaaa

SEQ ID NO: 1313 - RNA, 6101 nt, synthetic construct
  source 1..6101: mol_type = other RNA
aggaaataagagagaaaagaagagtaagaagaaatataagagccaccatgaaacggacagccgacggaagcgagttcgagtcaccaaagaagaagcggaaagtcagcgacctcgtgctgggcctcgacatcgggatcggaagcgtcggcgtgggaatcctgaacaaggtcaccggcgagatcatccacaagaacagtagaatcttccctgccgcccaggccgagaacaatgtggagcgcagaattaatagacagggcagaagactgaccagacggaagaagcacagaagagtgcggctgaaccatctgttcgaggagtccggactgatcaccgacttcacaaacgtgagcatcaacctgaacccttatcagctgagagtgaagggcctgaccgacgaactgagcaatgaggagctgttcatcgccctgaagaatatggtcaaacaccggggcatcagctacctggacgacgccagcgatgacggaaacagcagcgtgggcgactacgcccagatcgtgaaagagaacagcaagcagctggaaacaaagacccccggccagatccagctggagcggtaccagaagtacggccaactgcggggagacttcacagtggaagaagacggcaagaagcacagactgattaacgtcttccctaccagcgcctacagggccgaggccctgcggatactgcagacccagcaagagttcaaccctcagattaccgacgaattcatcaactcttacctgcagatcctgaccggaaagaggaagtactaccacggccccggcaacgaaaagagcagaacggattacggaagatacaccacaaagaaagatagcgaggacgagtacatcacgctggacaacatcttcggcatcctgatcggcaagtgcaccttctaccctgaggaatacagagccgccaaggccagctacaccgcccaggagtttaacctgctgaacgatctgaacaacctgacagtgcccaccgagacaaagaaactgtccgaggagcagaagaaccagattatcaccaacgtcaagaacgaaaaggccatgggacccgccaagctgttcaagtacatagccaagctcctgtcctgtgacgtggccgacatcaagggctaccgaatcgacaagtccgataaggccgagatccacaccttcgaggcctacagaaagatgaagaccctggcaacaatagacatagaacaaatggagagagagaacctggacaagctcgcatacgtgctcaccctgaacacagagaaggaaggaatacaggaggccctggagcatgaatttgctgacggaacctttagccaggagcaaatcgacgaactagtgcagttccggaaagccaactcaagcatctttggcaagggctggcacagcttcagcgtcaagctgatgatggagctgatccctgagctgtacgccaccagcgaggagcagatgacaatcctgaccagactgggcaagcaaaagacaaccagcagcagcaacaaaaccaagtacatcgacgagaagcagctgaccgaggaaatctacaatcccgtggccgccaaaagcgtgcgccaggccatcaaaatcgtgaacgccgccatcaaggaatacggcgacttcgacaacattgtgatcgaaatggcaagagagacaaacgaggacgatgaaaagaaggctatccagaaaatccagaaagccaataaggacgagaaagacgccgccatgctgaaggccgccaaccaatataacggcaaggccgagctgcctcacagtgtattccacggccacaagcagctggccaccaagatccggctgtggcaccagcagggcgagagatgcctgtatacaggtaaaaccatcagcatccacgacctgatcaacaacagcaaccagttcgaaatcgatcatatcctgcccctaagcatcacgttcgacgactccctggccaacaaagtgctggtgtacgctaccgcagcccaagagaaaggccagcggaccccttaccaggccctggacagcatggatgacgcctggtccttcagagagctaaaggccttcgtgcgggacagcaaagccctgagcaacaaaaagaaggagtacctgctgacagaggaggacatctccaagttcgacgtgagaaagaagttcatcgagcggaacctggtggacacccggtacgccagcagagtggtgctgaacgcgctacaggagcacttcagagtgcacaagacagacacaaaggtgtctgtggtgagaggccagttcacctcccagctgcggagacactggggcatcgagaaaacaagagacacctaccaccaccacgccgtggatgctctgatcatcgccgcaagcagccagctcaacctgtggaagaagcagaagaacacactggtgagctacagcgaagaccagctgctggacattgaaacgggcgaactgattagcgatgacgagtacaaggaaagcgtgtttaaagccccttaccagcactttgtcgacaccctgaagagtaaggagttcgaggacagcatcctgttctcctaccaagtggacagcaagttcaacagaaagatcagcgacgccaccatctacgccaccagacaggccaaagtgggcaaggacaagaaggacgagacatacgtgctgggcaagatcaaagacatttacagccagaccggatacgacgcctttataaagatatacaaaaaagacaagagcaagttcctgatgtacagacacgaccctcagaccttcgagaaggtgatcgaacctatcctggagaactaccctaacaaagaactgaatgagaagggcaaagaggtaccatgcaacccatttctgaaatacaaggaggaccacggctacatcagaaagtacagcaaaaaaggaaacggccccgaaatcaagagcctgaagtactacgatagcaagctgggcaatcacatagacatcacacccaagaactccaacaacaaggtcgttctgcagagcgtgtccccttggcgggctgacgtgtacttcaataagaccaccggcaaatacgaaatcctgggcctgaagtacgcggacctgaagttcgaaaagggcacaggcacatacaagatcagcgaggaaaagtacaacgacatcaaaatcaaggagggcgtggacagcgacagcgaattcaagttcaccctgtacaagaacgacctgctgctgatcaaggatacggaaacaaaggagcagcaactattccggttcctgagccggaccatgccaaatgtgaagcattacgtagaactgaaaccatacgataaacagaaattcgatgacaacgaggagctgatcaagatcctggggatcgtggccaagggaggccagtgcaagaagggcgtgtccaaaccaaacatcagcatctacaagatcagaaccgacgtgctgggcaaccagcacatcatcaagaacgaaggcgataagcccaagctggacttctccggcggaagctctggtggcagcgtgaccgtgaagttcaagtacaagggcgaggagctggaggtggacatcagcaagatcaagaaggtctggcgggtgggcaagatgatctcctttacctatgacctgaacggcaagacaggcagaggcgccgtgtctgagaaggatgcccccaaggagctgctgcagatgctggagaagtccggcaagaagagcggaggctctagcggcggaagcaccctgaacattgaagacgagtatagactgcatgaaacaagcaaggaacccgacgtgtccctgggctccacctggctgtccgactttccccaggcctgggccgagacaggaggaatgggcctggccgtgcggcaggcacccctgatcatccctctgaaggccacctctacacccgtgagcatcaagcagtaccctatgtctcaggaggccagactgggcatcaagcctcacatccagaggctgctggaccagggcatcctggtgccatgccagagcccctggaacacaccactgctgcccgtgaagaagccaggcaccaatgactatagacccgtgcaggatctgagagaggtgaacaagagggtggaggatatccaccccaccgtgcccaacccttacaatctgctgtccggcctgcccccttctcaccagtggtatacagtgctggacctgaaggatgccttcttttgtctgagactgcaccctaccagccagccactgttcgcctttgagtggagggaccctgagatgggcatctctggccagctgacctggacacgcctgcctcagggcttcaagaatagcccaacactgtttaacgaggccctgcaccgcgacctggcagatttccggatccagcacccagatctgatcctgctgcagtacgtggacgatctgctgctggccgccaccagcgagctggattgccagcagggaacacgcgccctgctgcagaccctgggaaacctgggatatagggcatccgccaagaaggcccagatctgtcagaagcaggtgaagtacctgggctatctgctgaaggagggccagagatggctgacagaggccaggaaggagacagtgatgggccagccaacacccaagaccccaagacagctgagggagttcctgggcaaagcaggattttgcaggctgttcatcccaggattcgcagagatggcagcacctctgtacccactgaccaagccgggcaccctgtttaattggggccctgaccagcagaaggcctatcaggagatcaagcaggccctgctgacagcaccagccctgggcctgccagacctgaccaagcctttcgagctgtttgtggatgagaagcagggctacgccaagggcgtgctgacccagaagctgggaccatggagacggcccgtggcctatctgtccaagaagctggacccagtggcagcaggatggccaccatgcctgaggatggtggcagcaatcgccgtgctgacaaaggatgccggcaagctgaccatgggacagccactggtcatcctggcaccacacgcagtggaggccctggtgaagcagcctccagatcgctggctgtctaacgcccggatgacacactaccaggccctgctgctggacaccgatcgcgtgcagtttggccctgtggtggccctgaatccagccaccctgctgcctctgccagaggagggcctgcagcacaactgtctggacatcctggcagaggcacacggaacaaggccagacctgaccgatcagcccctgcctgacgccgatcacacatggtataccgatggaagctccctgctgcaggagggccagaggaaggcaggagcagcagtgaccacagagacagaagtgatctgggccaaggccctgccagcaggcacatccgcccagcgggccgagctgatcgccctgacccaggccctgaagatggccgagggcaagaagctgaacgtgtacacagactccagatatgccttcgccaccgcacacatccacggagagatctacaggcgccggggctggctgacctctgagggcaaggagatcaagaacaaggatgagatcctggccctgctgaaggccctgtttctgcccaagcggctgagcatcatccactgtcctggacaccagaagggacactccgccgaggcaaggggcaatcggatggccgaccaggccgccagaaaggctgctattactgaaactcccgacacttccactctgctgattgaaaactcctccccttctggcggctcaaaaagaaccgccgacggcagcgaattcgagtctcccaagaagaagaggaaagtcggctctggccctgccgctaagagagtgaagctggactaatagtgagctggagcctcggtggccatgcttcttgccccttgggcctccccccagcccctcctccccttcctgcacccgtacccccgtggtctttgaataaagtctgagtgggcggcaaaaaaaaaaaaaaacaaaaaaaaaaaaaaaaaaaaaaaaaaaccaaaaaaaaaaaaaaaaaaaaaaaaaaaaaaaaaaaccccaaaaaaaaaaaaaaaaaaaaaaaaaaaaaaaaaaaaaaaaaaaaaa

SEQ ID NO: 1314 - RNA, 6005 nt, synthetic construct
  source 1..6005: mol_type = other RNA
aggaaataagagagaaaagaagagtaagaagaaatataagagccaccatgaaacggacagccgacggaagcgagttcgagtcaccaaagaagaagcggaaagtcagcgacctcgtgctgggcctcgacatcgggatcggaagcgtcggcgtgggaatcctgaacaaggtcaccggcgagatcatccacaagaacagtagaatcttccctgccgcccaggccgagaacaatgtggagcgcagaattaatagacagggcagaagactgaccagacggaagaagcacagaagagtgcggctgaaccatctgttcgaggagtccggactgatcaccgacttcacaaacgtgagcatcaacctgaacccttatcagctgagagtgaagggcctgaccgacgaactgagcaatgaggagctgttcatcgccctgaagaatatggtcaaacaccggggcatcagctacctggacgacgccagcgatgacggaaacagcagcgtgggcgactacgcccagatcgtgaaagagaacagcaagcagctggaaacaaagacccccggccagatccagctggagcggtaccagaagtacggccaactgcggggagacttcacagtggaagaagacggcaagaagcacagactgattaacgtcttccctaccagcgcctacagggccgaggccctgcggatactgcagacccagcaagagttcaaccctcagattaccgacgaattcatcaactcttacctgcagatcctgaccggaaagaggaagtactaccacggccccggcaacgaaaagagcagaacggattacggaagatacaccacaaagaaagatagcgaggacgagtacatcacgctggacaacatcttcggcatcctgatcggcaagtgcaccttctaccctgaggaatacagagccgccaaggccagctacaccgcccaggagtttaacctgctgaacgatctgaacaacctgacagtgcccaccgagacaaagaaactgtccgaggagcagaagaaccagattatcaccaacgtcaagaacgaaaaggccatgggacccgccaagctgttcaagtacatagccaagctcctgtcctgtgacgtggccgacatcaagggctaccgaatcgacaagtccgataaggccgagatccacaccttcgaggcctacagaaagatgaagaccctggcaacaatagacatagaacaaatggagagagagaacctggacaagctcgcatacgtgctcaccctgaacacagagaaggaaggaatacaggaggccctggagcatgaatttgctgacggaacctttagccaggagcaaatcgacgaactagtgcagttccggaaagccaactcaagcatctttggcaagggctggcacagcttcagcgtcaagctgatgatggagctgatccctgagctgtacgccaccagcgaggagcagatgacaatcctgaccagactgggcaagcaaaagacaaccagcagcagcaacaaaaccaagtacatcgacgagaagcagctgaccgaggaaatctacaatcccgtggccgccaaaagcgtgcgccaggccatcaaaatcgtgaacgccgccatcaaggaatacggcgacttcgacaacattgtgatcgaaatggcaagagagacaaacgaggacgatgaaaagaaggctatccagaaaatccagaaagccaataaggacgagaaagacgccgccatgctgaaggccgccaaccaatataacggcaaggccgagctgcctcacagtgtattccacggccacaagcagctggccaccaagatccggctgtggcaccagcagggcgagagatgcctgtatacaggtaaaaccatcagcatccacgacctgatcaacaacagcaaccagttcgaaatcgatcatatcctgcccctaagcatcacgttcgacgactccctggccaacaaagtgctggtgtacgctaccgcagcccaagagaaaggccagcggaccccttaccaggccctggacagcatggatgacgcctggtccttcagagagctaaaggccttcgtgcgggacagcaaagccctgagcaacaaaaagaaggagtacctgctgacagaggaggacatctccaagttcgacgtgagaaagaagttcatcgagcggaacctggtggacacccggtacgccagcagagtggtgctgaacgcgctacaggagcacttcagagtgcacaagacagacacaaaggtgtctgtggtgagaggccagttcacctcccagctgcggagacactggggcatcgagaaaacaagagacacctaccaccaccacgccgtggatgctctgatcatcgccgcaagcagccagctcaacctgtggaagaagcagaagaacacactggtgagctacagcgaagaccagctgctggacattgaaacgggcgaactgattagcgatgacgagtacaaggaaagcgtgtttaaagccccttaccagcactttgtcgacaccctgaagagtaaggagttcgaggacagcatcctgttctcctaccaagtggacagcaagttcaacagaaagatcagcgacgccaccatctacgccaccagacaggccaaagtgggcaaggacaagaaggacgagacatacgtgctgggcaagatcaaagacatttacagccagaccggatacgacgcctttataaagatatacaaaaaagacaagagcaagttcctgatgtacagacacgaccctcagaccttcgagaaggtgatcgaacctatcctggagaactaccctaacaaagaactgaatgagaagggcaaagaggtaccatgcaacccatttctgaaatacaaggaggaccacggctacatcagaaagtacagcaaaaaaggaaacggccccgaaatcaagagcctgaagtactacgatagcaagctgggcaatcacatagacatcacacccaagaactccaacaacaaggtcgttctgcagagcgtgtccccttggcgggctgacgtgtacttcaataagaccaccggcaaatacgaaatcctgggcctgaagtacgcggacctgaagttcgaaaagggcacaggcacatacaagatcagcgaggaaaagtacaacgacatcaaaatcaaggagggcgtggacagcgacagcgaattcaagttcaccctgtacaagaacgacctgctgctgatcaaggatacggaaacaaaggagcagcaactattccggttcctgagccggaccatgccaaatgtgaagcattacgtagaactgaaaccatacgataaacagaaattcgatgacaacgaggagctgatcaagatcctggggatcgtggccaagggaggccagtgcaagaagggcgtgtccaaaccaaacatcagcatctacaagatcagaaccgacgtgctgggcaaccagcacatcatcaagaacgaaggcgataagcccaagctggacttctccggcggaagctctggtggcagcaagcggaccgccgacggctctgaattcgagagcaaccagatccggatgaagatcggcgtgatgttcggcaatcccgagacaacaaccggcggcagcggaggctctagcggcggaagcaccctgaacattgaagacgagtatagactgcatgaaacaagcaaggaacccgacgtgtccctgggctccacctggctgtccgactttccccaggcctgggccgagacaggaggaatgggcctggccgtgcggcaggcacccctgatcatccctctgaaggccacctctacacccgtgagcatcaagcagtaccctatgtctcaggaggccagactgggcatcaagcctcacatccagaggctgctggaccagggcatcctggtgccatgccagagcccctggaacacaccactgctgcccgtgaagaagccaggcaccaatgactatagacccgtgcaggatctgagagaggtgaacaagagggtggaggatatccaccccaccgtgcccaacccttacaatctgctgtccggcctgcccccttctcaccagtggtatacagtgctggacctgaaggatgccttcttttgtctgagactgcaccctaccagccagccactgttcgcctttgagtggagggaccctgagatgggcatctctggccagctgacctggacacgcctgcctcagggcttcaagaatagcccaacactgtttaacgaggccctgcaccgcgacctggcagatttccggatccagcacccagatctgatcctgctgcagtacgtggacgatctgctgctggccgccaccagcgagctggattgccagcagggaacacgcgccctgctgcagaccctgggaaacctgggatatagggcatccgccaagaaggcccagatctgtcagaagcaggtgaagtacctgggctatctgctgaaggagggccagagatggctgacagaggccaggaaggagacagtgatgggccagccaacacccaagaccccaagacagctgagggagttcctgggcaaagcaggattttgcaggctgttcatcccaggattcgcagagatggcagcacctctgtacccactgaccaagccgggcaccctgtttaattggggccctgaccagcagaaggcctatcaggagatcaagcaggccctgctgacagcaccagccctgggcctgccagacctgaccaagcctttcgagctgtttgtggatgagaagcagggctacgccaagggcgtgctgacccagaagctgggaccatggagacggcccgtggcctatctgtccaagaagctggacccagtggcagcaggatggccaccatgcctgaggatggtggcagcaatcgccgtgctgacaaaggatgccggcaagctgaccatgggacagccactggtcatcctggcaccacacgcagtggaggccctggtgaagcagcctccagatcgctggctgtctaacgcccggatgacacactaccaggccctgctgctggacaccgatcgcgtgcagtttggccctgtggtggccctgaatccagccaccctgctgcctctgccagaggagggcctgcagcacaactgtctggacatcctggcagaggcacacggaacaaggccagacctgaccgatcagcccctgcctgacgccgatcacacatggtataccgatggaagctccctgctgcaggagggccagaggaaggcaggagcagcagtgaccacagagacagaagtgatctgggccaaggccctgccagcaggcacatccgcccagcgggccgagctgatcgccctgacccaggccctgaagatggccgagggcaagaagctgaacgtgtacacagactccagatatgccttcgccaccgcacacatccacggagagatctacaggcgccggggctggctgacctctgagggcaaggagatcaagaacaaggatgagatcctggccctgctgaaggccctgtttctgcccaagcggctgagcatcatccactgtcctggacaccagaagggacactccgccgaggcaaggggcaatcggatggccgaccaggccgccagaaaggctgctattactgaaactcccgacacttccactctgctgattgaaaactcctccccttctggcggctcaaaaagaaccgccgacggcagcgaattcgagtctcccaagaagaagaggaaagtcggctctggccctgccgctaagagagtgaagctggactaatagtgagctggagcctcggtggccatgcttcttgccccttgggcctccccccagcccctcctccccttcctgcacccgtacccccgtggtctttgaataaagtctgagtgggcggcaaaaaaaaaaaaaaacaaaaaaaaaaaaaaaaaaaaaaaaaaaccaaaaaaaaaaaaaaaaaaaaaaaaaaaaaaaaaaaccccaaaaaaaaaaaaaaaaaaaaaaaaaaaaaaaaaaaaaaaaaaaaaa

SEQ ID NO: 1315 - RNA, 6101 nt, synthetic construct
  source 1..6101: mol_type = other RNA
aggaaataagagagaaaagaagagtaagaagaaatataagagccaccatgaaacggacagccgacggaagcgagttcgagtcaccaaagaagaagcggaaagtcagcgacctcgtgctgggcctcgacatcgggatcggaagcgtcggcgtgggaatcctgaacaaggtcaccggcgagatcatccacaagaacagtagaatcttccctgccgcccaggccgagaacaatgtggagcgcagaattaatagacagggcagaagactgaccagacggaagaagcacagaagagtgcggctgaaccatctgttcgaggagtccggactgatcaccgacttcacaaacgtgagcatcaacctgaacccttatcagctgagagtgaagggcctgaccgacgaactgagcaatgaggagctgttcatcgccctgaagaatatggtcaaacaccggggcatcagctacctggacgacgccagcgatgacggaaacagcagcgtgggcgactacgcccagatcgtgaaagagaacagcaagcagctggaaacaaagacccccggccagatccagctggagcggtaccagaagtacggccaactgcggggagacttcacagtggaagaagacggcaagaagcacagactgattaacgtcttccctaccagcgcctacagggccgaggccctgcggatactgcagacccagcaagagttcaaccctcagattaccgacgaattcatcaactcttacctgcagatcctgaccggaaagaggaagtactaccacggccccggcaacgaaaagagcagaacggattacggaagatacaccacaaagaaagatagcgaggacgagtacatcacgctggacaacatcttcggcatcctgatcggcaagtgcaccttctaccctgaggaatacagagccgccaaggccagctacaccgcccaggagtttaacctgctgaacgatctgaacaacctgacagtgcccaccgagacaaagaaactgtccgaggagcagaagaaccagattatcaccaacgtcaagaacgaaaaggccatgggacccgccaagctgttcaagtacatagccaagctcctgtcctgtgacgtggccgacatcaagggctaccgaatcgacaagtccgataaggccgagatccacaccttcgaggcctacagaaagatgaagaccctggcaacaatagacatagaacaaatggagagagagaacctggacaagctcgcatacgtgctcaccctgaacacagagaaggaaggaatacaggaggccctggagcatgaatttgctgacggaacctttagccaggagcaaatcgacgaactagtgcagttccggaaagccaactcaagcatctttggcaagggctggcacagcttcagcgtcaagctgatgatggagctgatccctgagctgtacgccaccagcgaggagcagatgacaatcctgaccagactgggcaagcaaaagacaaccagcagcagcaacaaaaccaagtacatcgacgagaagcagctgaccgaggaaatctacaatcccgtggccgccaaaagcgtgcgccaggccatcaaaatcgtgaacgccgccatcaaggaatacggcgacttcgacaacattgtgatcgaaatggcaagagagacaaacgaggacgatgaaaagaaggctatccagaaaatccagaaagccaataaggacgagaaagacgccgccatgctgaaggccgccaaccaatataacggcaaggccgagctgcctcacagtgtattccacggccacaagcagctggccaccaagatccggctgtggcaccagcagggcgagagatgcctgtatacaggtaaaaccatcagcatccacgacctgatcaacaacagcaaccagttcgaaatcgatcatatcctgcccctaagcatcacgttcgacgactccctggccaacaaagtgctggtgtacgctaccgcagcccaagagaaaggccagcggaccccttaccaggccctggacagcatggatgacgcctggtccttcagagagctaaaggccttcgtgcgggacagcaaagccctgagcaacaaaaagaaggagtacctgctgacagaggaggacatctccaagttcgacgtgagaaagaagttcatcgagcggaacctggtggacacccggtacgccagcagagtggtgctgaacgcgctacaggagcacttcagagtgcacaagacagacacaaaggtgtctgtggtgagaggccagttcacctcccagctgcggagacactggggcatcgagaaaacaagagacacctaccaccaccacgccgtggatgctctgatcatcgccgcaagcagccagctcaacctgtggaagaagcagaagaacacactggtgagctacagcgaagaccagctgctggacattgaaacgggcgaactgattagcgatgacgagtacaaggaaagcgtgtttaaagccccttaccagcactttgtcgacaccctgaagagtaaggagttcgaggacagcatcctgttctcctaccaagtggacagcaagttcaacagaaagatcagcgacgccaccatctacgccaccagacaggccaaagtgggcaaggacaagaaggacgagacatacgtgctgggcaagatcaaagacatttacagccagaccggatacgacgcctttataaagatatacaaaaaagacaagagcaagttcctgatgtacagacacgaccctcagaccttcgagaaggtgatcgaacctatcctggagaactaccctaacaaagaactgaatgagaagggcaaagaggtaccatgcaacccatttctgaaatacaaggaggaccacggctacatcagaaagtacagcaaaaaaggaaacggccccgaaatcaagagcctgaagtactacgatagcaagctgggcaatcacatagacatcacacccaagaactccaacaacaaggtcgttctgcagagcgtgtccccttggcgggctgacgtgtacttcaataagaccaccggcaaatacgaaatcctgggcctgaagtacgcggacctgaagttcgaaaagggcacaggcacatacaagatcagcgaggaaaagtacaacgacatcaaaatcaaggagggcgtggacagcgacagcgaattcaagttcaccctgtacaagaacgacctgctgctgatcaaggatacggaaacaaaggagcagcaactattccggttcctgagccggaccatgccaaatgtgaagcattacgtagaactgaaaccatacgataaacagaaattcgatgacaacgaggagctgatcaagatcctggggatcgtggccaagggaggccagtgcaagaagggcgtgtccaaaccaaacatcagcatctacaagatcagaaccgacgtgctgggcaaccagcacatcatcaagaacgaaggcgataagcccaagctggacttctccggcggaagctctggtggcagcgtgaccgtgaagttcaagtacaagggcgaggagctggaggtggacatcagcaagatcaagaaggtctggcgggtgggcaagatgatctcctttacctatgacgataacggcaagacaggcagaggcgccgtgtctgagaaggatgcccccaaggagctgctgcagatgctggagaagtccggcaagaagagcggaggctctagcggcggaagcaccctgaacattgaagacgagtatagactgcatgaaacaagcaaggaacccgacgtgtccctgggctccacctggctgtccgactttccccaggcctgggccgagacaggaggaatgggcctggccgtgcggcaggcacccctgatcatccctctgaaggccacctctacacccgtgagcatcaagcagtaccctatgtctcaggaggccagactgggcatcaagcctcacatccagaggctgctggaccagggcatcctggtgccatgccagagcccctggaacacaccactgctgcccgtgaagaagccaggcaccaatgactatagacccgtgcaggatctgagagaggtgaacaagagggtggaggatatccaccccaccgtgcccaacccttacaatctgctgtccggcctgcccccttctcaccagtggtatacagtgctggacctgaaggatgccttcttttgtctgagactgcaccctaccagccagccactgttcgcctttgagtggagggaccctgagatgggcatctctggccagctgacctggacacgcctgcctcagggcttcaagaatagcccaacactgtttaacgaggccctgcaccgcgacctggcagatttccggatccagcacccagatctgatcctgctgcagtacgtggacgatctgctgctggccgccaccagcgagctggattgccagcagggaacacgcgccctgctgcagaccctgggaaacctgggatatagggcatccgccaagaaggcccagatctgtcagaagcaggtgaagtacctgggctatctgctgaaggagggccagagatggctgacagaggccaggaaggagacagtgatgggccagccaacacccaagaccccaagacagctgagggagttcctgggcaaagcaggattttgcaggctgttcatcccaggattcgcagagatggcagcacctctgtacccactgaccaagccgggcaccctgtttaattggggccctgaccagcagaaggcctatcaggagatcaagcaggccctgctgacagcaccagccctgggcctgccagacctgaccaagcctttcgagctgtttgtggatgagaagcagggctacgccaagggcgtgctgacccagaagctgggaccatggagacggcccgtggcctatctgtccaagaagctggacccagtggcagcaggatggccaccatgcctgaggatggtggcagcaatcgccgtgctgacaaaggatgccggcaagctgaccatgggacagccactggtcatcctggcaccacacgcagtggaggccctggtgaagcagcctccagatcgctggctgtctaacgcccggatgacacactaccaggccctgctgctggacaccgatcgcgtgcagtttggccctgtggtggccctgaatccagccaccctgctgcctctgccagaggagggcctgcagcacaactgtctggacatcctggcagaggcacacggaacaaggccagacctgaccgatcagcccctgcctgacgccgatcacacatggtataccgatggaagctccctgctgcaggagggccagaggaaggcaggagcagcagtgaccacagagacagaagtgatctgggccaaggccctgccagcaggcacatccgcccagcgggccgagctgatcgccctgacccaggccctgaagatggccgagggcaagaagctgaacgtgtacacagactccagatatgccttcgccaccgcacacatccacggagagatctacaggcgccggggctggctgacctctgagggcaaggagatcaagaacaaggatgagatcctggccctgctgaaggccctgtttctgcccaagcggctgagcatcatccactgtcctggacaccagaagggacactccgccgaggcaaggggcaatcggatggccgaccaggccgccagaaaggctgctattactgaaactcccgacacttccactctgctgattgaaaactcctccccttctggcggctcaaaaagaaccgccgacggcagcgaattcgagtctcccaagaagaagaggaaagtcggctctggccctgccgctaagagagtgaagctggactaatagtgagctggagcctcggtggccatgcttcttgccccttgggcctccccccagcccctcctccccttcctgcacccgtacccccgtggtctttgaataaagtctgagtgggcggcaaaaaaaaaaaaaaacaaaaaaaaaaaaaaaaaaaaaaaaaaaccaaaaaaaaaaaaaaaaaaaaaaaaaaaaaaaaaaaccccaaaaaaaaaaaaaaaaaaaaaaaaaaaaaaaaaaaaaaaaaaaaaa

SEQ ID NO: 1316 - RNA, 6101 nt, synthetic construct
  source 1..6101: mol_type = other RNA
aggaaataagagagaaaagaagagtaagaagaaatataagagccaccatgaaacggacagccgacggaagcgagttcgagtcaccaaagaagaagcggaaagtcagcgacctcgtgctgggcctcgacatcgggatcggaagcgtcggcgtgggaatcctgaacaaggtcaccggcgagatcatccacaagaacagtagaatcttccctgccgcccaggccgagaacaatgtggagcgcagaattaatagacagggcagaagactgaccagacggaagaagcacagaagagtgcggctgaaccatctgttcgaggagtccggactgatcaccgacttcacaaacgtgagcatcaacctgaacccttatcagctgagagtgaagggcctgaccgacgaactgagcaatgaggagctgttcatcgccctgaagaatatggtcaaacaccggggcatcagctacctggacgacgccagcgatgacggaaacagcagcgtgggcgactacgcccagatcgtgaaagagaacagcaagcagctggaaacaaagacccccggccagatccagctggagcggtaccagaagtacggccaactgcggggagacttcacagtggaagaagacggcaagaagcacagactgattaacgtcttccctaccagcgcctacagggccgaggccctgcggatactgcagacccagcaagagttcaaccctcagattaccgacgaattcatcaactcttacctgcagatcctgaccggaaagaggaagtactaccacggccccggcaacgaaaagagcagaacggattacggaagatacaccacaaagaaagatagcgaggacgagtacatcacgctggacaacatcttcggcatcctgatcggcaagtgcaccttctaccctgaggaatacagagccgccaaggccagctacaccgcccaggagtttaacctgctgaacgatctgaacaacctgacagtgcccaccgagacaaagaaactgtccgaggagcagaagaaccagattatcaccaacgtcaagaacgaaaaggccatgggacccgccaagctgttcaagtacatagccaagctcctgtcctgtgacgtggccgacatcaagggctaccgaatcgacaagtccgataaggccgagatccacaccttcgaggcctacagaaagatgaagaccctggcaacaatagacatagaacaaatggagagagagaacctggacaagctcgcatacgtgctcaccctgaacacagagaaggaaggaatacaggaggccctggagcatgaatttgctgacggaacctttagccaggagcaaatcgacgaactagtgcagttccggaaagccaactcaagcatctttggcaagggctggcacagcttcagcgtcaagctgatgatggagctgatccctgagctgtacgccaccagcgaggagcagatgacaatcctgaccagactgggcaagcaaaagacaaccagcagcagcaacaaaaccaagtacatcgacgagaagcagctgaccgaggaaatctacaatcccgtggccgccaaaagcgtgcgccaggccatcaaaatcgtgaacgccgccatcaaggaatacggcgacttcgacaacattgtgatcgaaatggcaagagagacaaacgaggacgatgaaaagaaggctatccagaaaatccagaaagccaataaggacgagaaagacgccgccatgctgaaggccgccaaccaatataacggcaaggccgagctgcctcacagtgtattccacggccacaagcagctggccaccaagatccggctgtggcaccagcagggcgagagatgcctgtatacaggtaaaaccatcagcatccacgacctgatcaacaacagcaaccagttcgaaatcgatcatatcctgcccctaagcatcacgttcgacgactccctggccaacaaagtgctggtgtacgctaccgcagcccaagagaaaggccagcggaccccttaccaggccctggacagcatggatgacgcctggtccttcagagagctaaaggccttcgtgcgggacagcaaagccctgagcaacaaaaagaaggagtacctgctgacagaggaggacatctccaagttcgacgtgagaaagaagttcatcgagcggaacctggtggacacccggtacgccagcagagtggtgctgaacgcgctacaggagcacttcagagtgcacaagacagacacaaaggtgtctgtggtgagaggccagttcacctcccagctgcggagacactggggcatcgagaaaacaagagacacctaccaccaccacgccgtggatgctctgatcatcgccgcaagcagccagctcaacctgtggaagaagcagaagaacacactggtgagctacagcgaagaccagctgctggacattgaaacgggcgaactgattagcgatgacgagtacaaggaaagcgtgtttaaagccccttaccagcactttgtcgacaccctgaagagtaaggagttcgaggacagcatcctgttctcctaccaagtggacagcaagttcaacagaaagatcagcgacgccaccatctacgccaccagacaggccaaagtgggcaaggacaagaaggacgagacatacgtgctgggcaagatcaaagacatttacagccagaccggatacgacgcctttataaagatatacaaaaaagacaagagcaagttcctgatgtacagacacgaccctcagaccttcgagaaggtgatcgaacctatcctggagaactaccctaacaaagaactgaatgagaagggcaaagaggtaccatgcaacccatttctgaaatacaaggaggaccacggctacatcagaaagtacagcaaaaaaggaaacggccccgaaatcaagagcctgaagtactacgatagcaagctgggcaatcacatagacatcacacccaagaactccaacaacaaggtcgttctgcagagcgtgtccccttggcgggctgacgtgtacttcaataagaccaccggcaaatacgaaatcctgggcctgaagtacgcggacctgaagttcgaaaagggcacaggcacatacaagatcagcgaggaaaagtacaacgacatcaaaatcaaggagggcgtggacagcgacagcgaattcaagttcaccctgtacaagaacgacctgctgctgatcaaggatacggaaacaaaggagcagcaactattccggttcctgagccggaccatgccaaatgtgaagcattacgtagaactgaaaccatacgataaacagaaattcgatgacaacgaggagctgatcaagatcctggggatcgtggccaagggaggccagtgcaagaagggcgtgtccaaaccaaacatcagcatctacaagatcagaaccgacgtgctgggcaaccagcacatcatcaagaacgaaggcgataagcccaagctggacttctccggcggaagctctggtggcagcgtgaccgtgaagttcaagtacaagggcgaggagaaggaggtggacatcagcaagatcaagaaggtctggcgggtgggcaagatgatctcctttacctatgacctgaacggcaagacaggcagaggcgccgtgtctgagaaggatgcccccaaggagctgctgcagatgctggagaagtccggcaagaagagcggaggctctagcggcggaagcaccctgaacattgaagacgagtatagactgcatgaaacaagcaaggaacccgacgtgtccctgggctccacctggctgtccgactttccccaggcctgggccgagacaggaggaatgggcctggccgtgcggcaggcacccctgatcatccctctgaaggccacctctacacccgtgagcatcaagcagtaccctatgtctcaggaggccagactgggcatcaagcctcacatccagaggctgctggaccagggcatcctggtgccatgccagagcccctggaacacaccactgctgcccgtgaagaagccaggcaccaatgactatagacccgtgcaggatctgagagaggtgaacaagagggtggaggatatccaccccaccgtgcccaacccttacaatctgctgtccggcctgcccccttctcaccagtggtatacagtgctggacctgaaggatgccttcttttgtctgagactgcaccctaccagccagccactgttcgcctttgagtggagggaccctgagatgggcatctctggccagctgacctggacacgcctgcctcagggcttcaagaatagcccaacactgtttaacgaggccctgcaccgcgacctggcagatttccggatccagcacccagatctgatcctgctgcagtacgtggacgatctgctgctggccgccaccagcgagctggattgccagcagggaacacgcgccctgctgcagaccctgggaaacctgggatatagggcatccgccaagaaggcccagatctgtcagaagcaggtgaagtacctgggctatctgctgaaggagggccagagatggctgacagaggccaggaaggagacagtgatgggccagccaacacccaagaccccaagacagctgagggagttcctgggcaaagcaggattttgcaggctgttcatcccaggattcgcagagatggcagcacctctgtacccactgaccaagccgggcaccctgtttaattggggccctgaccagcagaaggcctatcaggagatcaagcaggccctgctgacagcaccagccctgggcctgccagacctgaccaagcctttcgagctgtttgtggatgagaagcagggctacgccaagggcgtgctgacccagaagctgggaccatggagacggcccgtggcctatctgtccaagaagctggacccagtggcagcaggatggccaccatgcctgaggatggtggcagcaatcgccgtgctgacaaaggatgccggcaagctgaccatgggacagccactggtcatcctggcaccacacgcagtggaggccctggtgaagcagcctccagatcgctggctgtctaacgcccggatgacacactaccaggccctgctgctggacaccgatcgcgtgcagtttggccctgtggtggccctgaatccagccaccctgctgcctctgccagaggagggcctgcagcacaactgtctggacatcctggcagaggcacacggaacaaggccagacctgaccgatcagcccctgcctgacgccgatcacacatggtataccgatggaagctccctgctgcaggagggccagaggaaggcaggagcagcagtgaccacagagacagaagtgatctgggccaaggccctgccagcaggcacatccgcccagcgggccgagctgatcgccctgacccaggccctgaagatggccgagggcaagaagctgaacgtgtacacagactccagatatgccttcgccaccgcacacatccacggagagatctacaggcgccggggctggctgacctctgagggcaaggagatcaagaacaaggatgagatcctggccctgctgaaggccctgtttctgcccaagcggctgagcatcatccactgtcctggacaccagaagggacactccgccgaggcaaggggcaatcggatggccgaccaggccgccagaaaggctgctattactgaaactcccgacacttccactctgctgattgaaaactcctccccttctggcggctcaaaaagaaccgccgacggcagcgaattcgagtctcccaagaagaagaggaaagtcggctctggccctgccgctaagagagtgaagctggactaatagtgagctggagcctcggtggccatgcttcttgccccttgggcctccccccagcccctcctccccttcctgcacccgtacccccgtggtctttgaataaagtctgagtgggcggcaaaaaaaaaaaaaaacaaaaaaaaaaaaaaaaaaaaaaaaaaaccaaaaaaaaaaaaaaaaaaaaaaaaaaaaaaaaaaaccccaaaaaaaaaaaaaaaaaaaaaaaaaaaaaaaaaaaaaaaaaaaaaa

SEQ ID NO: 1317 - RNA, 5477 nt, synthetic construct
  source 1..5477: mol_type = other RNA
aggaaataagagagaaaagaagagtaagaagaaatataagagccaccatgaaacggacagccgacggaagcgagttcgagtcaccaaagaagaagcggaaagtctacccctacgacgtgcctgattacgccaaggataagaaaagcgacggcaaggacagccagaagaagggctctagcgacctcgtgctgggcctcgacatcgggatcggaagcgtcggcgtgggaatcctgaacaaggtcaccggcgagatcatccacaagaacagtagaatcttccctgccgcccaggccgagaacaatgtggagcgcagaattaatagacagggcagaagactgaccagacggaagaagcacagaagagtgcggctgaaccatctgttcgaggagtccggactgatcaccgacttcacaaacgtgagcatcaacctgaacccttatcagctgagagtgaagggcctgaccgacgaactgagcaatgaggagctgttcatcgccctgaagaatatggtcaaacaccggggcatcagctacctggacgacgccagcgatgacggaaacagcagcgtgggcgactacgcccagatcgtgaaagagaacagcaagcagctggaaacaaagacccccggccagatccagctggagcggtaccagaagtacggccaactgcggggagacttcacagtggaagaagacggcaagaagcacagactgattaacgtcttccctaccagcgcctacagggccgaggccctgcggatactgcagacccagcaagagttcaaccctcagattaccgacgaattcatcaactcttacctgcagatcctgaccggaaagaggaagtactaccacggccccggcaacgaaaagagcagaacggattacggaagatacaccacaaagaaagatagcgaggacgagtacatcacgctggacaacatcttcggcatcctgatcggcaagtgcaccttctaccctgaggaatacagagccgccaaggccagctacaccgcccaggagtttaacctgctgaacgatctgaacaacctgacagtgcccaccgagacaaagaaactgtccgaggagcagaagaaccagattatcaccaacgtcaagaacgaaaaggccatgggacccgccaagctgttcaagtacatagccaagctcctgtcctgtgacgtggccgacatcaagggctaccgaatcgacaagtccgataaggccgagatccacaccttcgaggcctacagaaagatgaagaccctggcaacaatagacatagaacaaatggagagagagaacctggacaagctcgcatacgtgctcaccctgaacacagagaaggaaggaatacaggaggccctggagcatgaatttgctgacggaacctttagccaggagcaaatcgacgaactagtgcagttccggaaagccaactcaagcatctttggcaagggctggcacagcttcagcgtcaagctgatgatggagctgatccctgagctgtacgccaccagcgaggagcagatgacaatcctgaccagactgggcaagcaaaagacaaccagcagcagcaacaaaaccaagtacatcgacgagaagcagctgaccgaggaaatctacaatcccgtggccgccaaaagcgtgcgccaggccatcaaaatcgtgaacgccgccatcaaggaatacggcgacttcgacaacattgtgatcgaaatggcaagagagacaaacgaggacgatgaaaagaaggctatccagaaaatccagaaagccaataaggacgagaaagacgccgccatgctgaaggccgccaaccaatataacggcaaggccgagctgcctcacagtgtattccacggccacaagcagctggccaccaagatccggctgtggcaccagcagggcgagagatgcctgtatacaggtaaaaccatcagcatccacgacctgatcaacaacagcaaccagttcgaaatcgatcatatcctgcccctaagcatcacgttcgacgactccctggccaacaaagtgctggtgtacgctaccgcagcccaagagaaaggccagcggaccccttaccaggccctggacagcatggatgacgcctggtccttcagagagctaaaggccttcgtgcgggacagcaaagccctgagcaacaaaaagaaggagtacctgctgacagaggaggacatctccaagttcgacgtgagaaagaagttcatcgagcggaacctggtggacacccggtacgccagcagagtggtgctgaacgcgctacaggagcacttcagagtgcacaagacagacacaaaggtgtctgtggtgagaggccagttcacctcccagctgcggagacactggggcatcgagaaaacaagagacacctaccaccaccacgccgtggatgctctgatcatcgccgcaagcagccagctcaacctgtggaagaagcagaagaacacactggtgagctacagcgaagaccagctgctggacattgaaacgggcgaactgattagcgatgacgagtacaaggaaagcgtgtttaaagccccttaccagcactttgtcgacaccctgaagagtaaggagttcgaggacagcatcctgttctcctaccaagtggacagcaagttcaacagaaagatcagcgacgccaccatctacgccaccagacaggccaaagtgggcaaggacaagaaggacgagacatacgtgctgggcaagatcaaagacatttacagccagaccggatacgacgcctttataaagatatacaaaaaagacaagagcaagttcctgatgtacagacacgaccctcagaccttcgagaaggtgatcgaacctatcctggagaactaccctaacaaagaactgaatgagaagggcaaagaggtaccatgcaacccatttctgaaatacaaggaggaccacggctacatcagaaagtacagcaaaaaaggaaacggccccgaaatcaagagcctgaagtactacgatagcaagctgggcaatcacatagacatcacacccaagaactccaacaacaaggtcgttctgcagagcgtgtccccttggcgggctgacgtgtacttcaataagaccaccggcaaatacgaaatcctgggcctgaagtacgcggacctgaagttcgaaaagggcacaggcacatacaagatcagcgaggaaaagtacaacgacatcaaaatcaaggagggcgtggacagcgacagcgaattcaagttcaccctgtacaagaacgacctgctgctgatcaaggatacggaaacaaaggagcagcaactattccggttcctgagccggaccatgccaaatgtgaagcattacgtagaactgaaaccatacgataaacagaaattcgatgacaacgaggagctgatcaagatcctggggatcgtggccaagggaggccagtgcaagaagggcgtgtccaaaccaaacatcagcatctacaagatcagaaccgacgtgctgggcaaccagcacatcatcaagaacgaaggcgataagcccaagctggacttctccggcggaagctctggtggcagcaagcggaccgccgacggctctgaattcgagagccctaagaagaaaagaaaggtgagcggaggctctagcggcggaagcaccctgaacattgaagacgagtatagactgcatgaaacaagcaaggaacccgacgtgtccctgggctccacctggctgtccgactttccccaggcctgggccgagacaggaggaatgggcctggccgtgcggcaggcacccctgatcatccctctgaaggccacctctacacccgtgagcatcaagcagtaccctatgtctcaggaggccagactgggcatcaagcctcacatccagaggctgctggaccagggcatcctggtgccatgccagagcccctggaacacaccactgctgcccgtgaagaagccaggcaccaatgactatagacccgtgcaggatctgagagaggtgaacaagagggtggaggatatccaccccaccgtgcccaacccttacaatctgctgtccggcctgcccccttctcaccagtggtatacagtgctggacctgaaggatgccttcttttgtctgagactgcaccctaccagccagccactgttcgcctttgagtggagggaccctgagatgggcatctctggccagctgacctggacacgcctgcctcagggcttcaagaatagcccaacactgtttaacgaggccctgcaccgcgacctggcagatttccggatccagcacccagatctgatcctgctgcagtacgtggacgatctgctgctggccgccaccagcgagctggattgccagcagggaacacgcgccctgctgcagaccctgggaaacctgggatatagggcatccgccaagaaggcccagatctgtcagaagcaggtgaagtacctgggctatctgctgaaggagggccagagatggctgacagaggccaggaaggagacagtgatgggccagccaacacccaagaccccaagacagctgagggagttcctgggcaaagcaggattttgcaggctgttcatcccaggattcgcagagatggcagcacctctgtacccactgaccaagccgggcaccctgtttaattggggccctgaccagcagaaggcctatcaggagatcaagcaggccctgctgacagcaccagccctgggcctgccagacctgaccaagcctttcgagctgtttgtggatgagaagcagggctacgccaagggcgtgctgacccagaagctgggaccatggagacggcccgtggcctatctgtccaagaagctggacccagtggcagcaggatggccaccatgcctgaggatggtggcagcaatcgccgtgctgacaaaggatgccggcaagctgaccatgggacagccactggtcatcctggcaccacacgcagtggaggccctggtgaagcagcctccagatcgctggctgtctaacgcccggatgacacactaccaggccctgctgctggacaccgatcgcgtgcagtttggccctgtggtggccctgaatccagccaccctgctgcctctgccagaggagggctctggcggctcaaaaagaaccgccgacggcagcgaattcgagtctcccaagaagaagaggaaagtcggctctggccctgccgctaagagagtgaagctggactaatagtgagctggagcctcggtggccatgcttcttgccccttgggcctccccccagcccctcctccccttcctgcacccgtacccccgtggtctttgaataaagtctgagtgggcggcaaaaaaaaaaaaaaacaaaaaaaaaaaaaaaaaaaaaaaaaaaccaaaaaaaaaaaaaaaaaaaaaaaaaaaaaaaaaaaccccaaaaaaaaaaaaaaaaaaaaaaaaaaaaaaaaaaaaaaaaaaaaaa

SEQ ID NO: 1318 - RNA, 5483 nt, synthetic construct
  source 1..5483: mol_type = other RNA
aggaaataagagagaaaagaagagtaagaagaaatataagagccaccatgaaacggacagccgacggaagcgagttcgagtcaccaaagaagaagcggaaagtccagcctagattcgccgccgctggatctggcaaggataagaaaagcgacggcaaggacagccagaagaagggctccggcagcgacctcgtgctgggcctcgacatcgggatcggaagcgtcggcgtgggaatcctgaacaaggtcaccggcgagatcatccacaagaacagtagaatcttccctgccgcccaggccgagaacaatgtggagcgcagaattaatagacagggcagaagactgaccagacggaagaagcacagaagagtgcggctgaaccatctgttcgaggagtccggactgatcaccgacttcacaaacgtgagcatcaacctgaacccttatcagctgagagtgaagggcctgaccgacgaactgagcaatgaggagctgttcatcgccctgaagaatatggtcaaacaccggggcatcagctacctggacgacgccagcgatgacggaaacagcagcgtgggcgactacgcccagatcgtgaaagagaacagcaagcagctggaaacaaagacccccggccagatccagctggagcggtaccagaagtacggccaactgcggggagacttcacagtggaagaagacggcaagaagcacagactgattaacgtcttccctaccagcgcctacagggccgaggccctgcggatactgcagacccagcaagagttcaaccctcagattaccgacgaattcatcaactcttacctgcagatcctgaccggaaagaggaagtactaccacggccccggcaacgaaaagagcagaacggattacggaagatacaccacaaagaaagatagcgaggacgagtacatcacgctggacaacatcttcggcatcctgatcggcaagtgcaccttctaccctgaggaatacagagccgccaaggccagctacaccgcccaggagtttaacctgctgaacgatctgaacaacctgacagtgcccaccgagacaaagaaactgtccgaggagcagaagaaccagattatcaccaacgtcaagaacgaaaaggccatgggacccgccaagctgttcaagtacatagccaagctcctgtcctgtgacgtggccgacatcaagggctaccgaatcgacaagtccgataaggccgagatccacaccttcgaggcctacagaaagatgaagaccctggcaacaatagacatagaacaaatggagagagagaacctggacaagctcgcatacgtgctcaccctgaacacagagaaggaaggaatacaggaggccctggagcatgaatttgctgacggaacctttagccaggagcaaatcgacgaactagtgcagttccggaaagccaactcaagcatctttggcaagggctggcacagcttcagcgtcaagctgatgatggagctgatccctgagctgtacgccaccagcgaggagcagatgacaatcctgaccagactgggcaagcaaaagacaaccagcagcagcaacaaaaccaagtacatcgacgagaagcagctgaccgaggaaatctacaatcccgtggccgccaaaagcgtgcgccaggccatcaaaatcgtgaacgccgccatcaaggaatacggcgacttcgacaacattgtgatcgaaatggcaagagagacaaacgaggacgatgaaaagaaggctatccagaaaatccagaaagccaataaggacgagaaagacgccgccatgctgaaggccgccaaccaatataacggcaaggccgagctgcctcacagtgtattccacggccacaagcagctggccaccaagatccggctgtggcaccagcagggcgagagatgcctgtatacaggtaaaaccatcagcatccacgacctgatcaacaacagcaaccagttcgaaatcgatcatatcctgcccctaagcatcacgttcgacgactccctggccaacaaagtgctggtgtacgctaccgcagcccaagagaaaggccagcggaccccttaccaggccctggacagcatggatgacgcctggtccttcagagagctaaaggccttcgtgcgggacagcaaagccctgagcaacaaaaagaaggagtacctgctgacagaggaggacatctccaagttcgacgtgagaaagaagttcatcgagcggaacctggtggacacccggtacgccagcagagtggtgctgaacgcgctacaggagcacttcagagtgcacaagacagacacaaaggtgtctgtggtgagaggccagttcacctcccagctgcggagacactggggcatcgagaaaacaagagacacctaccaccaccacgccgtggatgctctgatcatcgccgcaagcagccagctcaacctgtggaagaagcagaagaacacactggtgagctacagcgaagaccagctgctggacattgaaacgggcgaactgattagcgatgacgagtacaaggaaagcgtgtttaaagccccttaccagcactttgtcgacaccctgaagagtaaggagttcgaggacagcatcctgttctcctaccaagtggacagcaagttcaacagaaagatcagcgacgccaccatctacgccaccagacaggccaaagtgggcaaggacaagaaggacgagacatacgtgctgggcaagatcaaagacatttacagccagaccggatacgacgcctttataaagatatacaaaaaagacaagagcaagttcctgatgtacagacacgaccctcagaccttcgagaaggtgatcgaacctatcctggagaactaccctaacaaagaactgaatgagaagggcaaagaggtaccatgcaacccatttctgaaatacaaggaggaccacggctacatcagaaagtacagcaaaaaaggaaacggccccgaaatcaagagcctgaagtactacgatagcaagctgggcaatcacatagacatcacacccaagaactccaacaacaaggtcgttctgcagagcgtgtccccttggcgggctgacgtgtacttcaataagaccaccggcaaatacgaaatcctgggcctgaagtacgcggacctgaagttcgaaaagggcacaggcacatacaagatcagcgaggaaaagtacaacgacatcaaaatcaaggagggcgtggacagcgacagcgaattcaagttcaccctgtacaagaacgacctgctgctgatcaaggatacggaaacaaaggagcagcaactattccggttcctgagccggaccatgccaaatgtgaagcattacgtagaactgaaaccatacgataaacagaaattcgatgacaacgaggagctgatcaagatcctggggatcgtggccaagggaggccagtgcaagaagggcgtgtccaaaccaaacatcagcatctacaagatcagaaccgacgtgctgggcaaccagcacatcatcaagaacgaaggcgataagcccaagctggacttctccggcggaagctctggtggcagcaagcggaccgccgacggctctgaattcgagagccctaagaagaaaagaaaggtgagcggaggctctagcggcggaagcaccctgaacattgaagacgagtatagactgcatgaaacaagcaaggaacccgacgtgtccctgggctccacctggctgtccgactttccccaggcctgggccgagacaggaggaatgggcctggccgtgcggcaggcacccctgatcatccctctgaaggccacctctacacccgtgagcatcaagcagtaccctatgtctcaggaggccagactgggcatcaagcctcacatccagaggctgctggaccagggcatcctggtgccatgccagagcccctggaacacaccactgctgcccgtgaagaagccaggcaccaatgactatagacccgtgcaggatctgagagaggtgaacaagagggtggaggatatccaccccaccgtgcccaacccttacaatctgctgtccggcctgcccccttctcaccagtggtatacagtgctggacctgaaggatgccttcttttgtctgagactgcaccctaccagccagccactgttcgcctttgagtggagggaccctgagatgggcatctctggccagctgacctggacacgcctgcctcagggcttcaagaatagcccaacactgtttaacgaggccctgcaccgcgacctggcagatttccggatccagcacccagatctgatcctgctgcagtacgtggacgatctgctgctggccgccaccagcgagctggattgccagcagggaacacgcgccctgctgcagaccctgggaaacctgggatatagggcatccgccaagaaggcccagatctgtcagaagcaggtgaagtacctgggctatctgctgaaggagggccagagatggctgacagaggccaggaaggagacagtgatgggccagccaacacccaagaccccaagacagctgagggagttcctgggcaaagcaggattttgcaggctgttcatcccaggattcgcagagatggcagcacctctgtacccactgaccaagccgggcaccctgtttaattggggccctgaccagcagaaggcctatcaggagatcaagcaggccctgctgacagcaccagccctgggcctgccagacctgaccaagcctttcgagctgtttgtggatgagaagcagggctacgccaagggcgtgctgacccagaagctgggaccatggagacggcccgtggcctatctgtccaagaagctggacccagtggcagcaggatggccaccatgcctgaggatggtggcagcaatcgccgtgctgacaaaggatgccggcaagctgaccatgggacagccactggtcatcctggcaccacacgcagtggaggccctggtgaagcagcctccagatcgctggctgtctaacgcccggatgacacactaccaggccctgctgctggacaccgatcgcgtgcagtttggccctgtggtggccctgaatccagccaccctgctgcctctgccagaggagggctctggcggctcaaaaagaaccgccgacggcagcgaattcgagtctcccaagaagaagaggaaagtcggctctggccctgccgctaagagagtgaagctggactaatagtgagctggagcctcggtggccatgcttcttgccccttgggcctccccccagcccctcctccccttcctgcacccgtacccccgtggtctttgaataaagtctgagtgggcggcaaaaaaaaaaaaaaacaaaaaaaaaaaaaaaaaaaaaaaaaaaccaaaaaaaaaaaaaaaaaaaaaaaaaaaaaaaaaaaccccaaaaaaaaaaaaaaaaaaaaaaaaaaaaaaaaaaaaaaaaaaaaaa

SEQ ID NO: 1319 - RNA, 5555 nt, synthetic construct
  source 1..5555: mol_type = other RNA
aggaaataagagagaaaagaagagtaagaagaaatataagagccaccatgaaacggacagccgacggaagcgagttcgagtcaccaaagaagaagcggaaagtctacccctacgacgtgcctgattacgcccagcctagattcgccgccgctggatctggcaaagacggcaagaaggacaagaaagaggaagataagaagggcagcagcgacctcgtgctgggcctcgacatcgggatcggaagcgtcggcgtgggaatcctgaacaaggtcaccggcgagatcatccacaagaacagtagaatcttccctgccgcccaggccgagaacaatgtggagcgcagaattaatagacagggcagaagactgaccagacggaagaagcacagaagagtgcggctgaaccatctgttcgaggagtccggactgatcaccgacttcacaaacgtgagcatcaacctgaacccttatcagctgagagtgaagggcctgaccgacgaactgagcaatgaggagctgttcatcgccctgaagaatatggtcaaacaccggggcatcagctacctggacgacgccagcgatgacggaaacagcagcgtgggcgactacgcccagatcgtgaaagagaacagcaagcagctggaaacaaagacccccggccagatccagctggagcggtaccagaagtacggccaactgcggggagacttcacagtggaagaagacggcaagaagcacagactgattaacgtcttccctaccagcgcctacagggccgaggccctgcggatactgcagacccagcaagagttcaaccctcagattaccgacgaattcatcaactcttacctgcagatcctgaccggaaagaggaagtactaccacggccccggcaacgaaaagagcagaacggattacggaagatacaccacaaagaaagatagcgaggacgagtacatcacgctggacaacatcttcggcatcctgatcggcaagtgcaccttctaccctgaggaatacagagccgccaaggccagctacaccgcccaggagtttaacctgctgaacgatctgaacaacctgacagtgcccaccgagacaaagaaactgtccgaggagcagaagaaccagattatcaccaacgtcaagaacgaaaaggccatgggacccgccaagctgttcaagtacatagccaagctcctgtcctgtgacgtggccgacatcaagggctaccgaatcgacaagtccgataaggccgagatccacaccttcgaggcctacagaaagatgaagaccctggcaacaatagacatagaacaaatggagagagagaacctggacaagctcgcatacgtgctcaccctgaacacagagaaggaaggaatacaggaggccctggagcatgaatttgctgacggaacctttagccaggagcaaatcgacgaactagtgcagttccggaaagccaactcaagcatctttggcaagggctggcacagcttcagcgtcaagctgatgatggagctgatccctgagctgtacgccaccagcgaggagcagatgacaatcctgaccagactgggcaagcaaaagacaaccagcagcagcaacaaaaccaagtacatcgacgagaagcagctgaccgaggaaatctacaatcccgtggccgccaaaagcgtgcgccaggccatcaaaatcgtgaacgccgccatcaaggaatacggcgacttcgacaacattgtgatcgaaatggcaagagagacaaacgaggacgatgaaaagaaggctatccagaaaatccagaaagccaataaggacgagaaagacgccgccatgctgaaggccgccaaccaatataacggcaaggccgagctgcctcacagtgtattccacggccacaagcagctggccaccaagatccggctgtggcaccagcagggcgagagatgcctgtatacaggtaaaaccatcagcatccacgacctgatcaacaacagcaaccagttcgaaatcgatcatatcctgcccctaagcatcacgttcgacgactccctggccaacaaagtgctggtgtacgctaccgcagcccaagagaaaggccagcggaccccttaccaggccctggacagcatggatgacgcctggtccttcagagagctaaaggccttcgtgcgggacagcaaagccctgagcaacaaaaagaaggagtacctgctgacagaggaggacatctccaagttcgacgtgagaaagaagttcatcgagcggaacctggtggacacccggtacgccagcagagtggtgctgaacgcgctacaggagcacttcagagtgcacaagacagacacaaaggtgtctgtggtgagaggccagttcacctcccagctgcggagacactggggcatcgagaaaacaagagacacctaccaccaccacgccgtggatgctctgatcatcgccgcaagcagccagctcaacctgtggaagaagcagaagaacacactggtgagctacagcgaagaccagctgctggacattgaaacgggcgaactgattagcgatgacgagtacaaggaaagcgtgtttaaagccccttaccagcactttgtcgacaccctgaagagtaaggagttcgaggacagcatcctgttctcctaccaagtggacagcaagttcaacagaaagatcagcgacgccaccatctacgccaccagacaggccaaagtgggcaaggacaagaaggacgagacatacgtgctgggcaagatcaaagacatttacagccagaccggatacgacgcctttataaagatatacaaaaaagacaagagcaagttcctgatgtacagacacgaccctcagaccttcgagaaggtgatcgaacctatcctggagaactaccctaacaaagaactgaatgagaagggcaaagaggtaccatgcaacccatttctgaaatacaaggaggaccacggctacatcagaaagtacagcaaaaaaggaaacggccccgaaatcaagagcctgaagtactacgatagcaagctgggcaatcacatagacatcacacccaagaactccaacaacaaggtcgttctgcagagcgtgtccccttggcgggctgacgtgtacttcaataagaccaccggcaaatacgaaatcctgggcctgaagtacgcggacctgaagttcgaaaagggcacaggcacatacaagatcagcgaggaaaagtacaacgacatcaaaatcaaggagggcgtggacagcgacagcgaattcaagttcaccctgtacaagaacgacctgctgctgatcaaggatacggaaacaaaggagcagcaactattccggttcctgagccggaccatgccaaatgtgaagcattacgtagaactgaaaccatacgataaacagaaattcgatgacaacgaggagctgatcaagatcctggggatcgtggccaagggaggccagtgcaagaagggcgtgtccaaaccaaacatcagcatctacaagatcagaaccgacgtgctgggcaaccagcacatcatcaagaacgaaggcgataagcccaagctggacttctccggcggaagctctggtggcagcaagcggaccgccgacggctctgaattcgagagccctaagaagaaaagaaaggtgagcggaggctctagcggcggaagcaccctgaacattgaagacgagtatagactgcatgaaacaagcaaggaacccgacgtgtccctgggctccacctggctgtccgactttccccaggcctgggccgagacaggaggaatgggcctggccgtgcggcaggcacccctgatcatccctctgaaggccacctctacacccgtgagcatcaagcagtaccctatgtctcaggaggccagactgggcatcaagcctcacatccagaggctgctggaccagggcatcctggtgccatgccagagcccctggaacacaccactgctgcccgtgaagaagccaggcaccaatgactatagacccgtgcaggatctgagagaggtgaacaagagggtggaggatatccaccccaccgtgcccaacccttacaatctgctgtccggcctgcccccttctcaccagtggtatacagtgctggacctgaaggatgccttcttttgtctgagactgcaccctaccagccagccactgttcgcctttgagtggagggaccctgagatgggcatctctggccagctgacctggacacgcctgcctcagggcttcaagaatagcccaacactgtttaacgaggccctgcaccgcgacctggcagatttccggatccagcacccagatctgatcctgctgcagtacgtggacgatctgctgctggccgccaccagcgagctggattgccagcagggaacacgcgccctgctgcagaccctgggaaacctgggatatagggcatccgccaagaaggcccagatctgtcagaagcaggtgaagtacctgggctatctgctgaaggagggccagagatggctgacagaggccaggaaggagacagtgatgggccagccaacacccaagaccccaagacagctgagggagttcctgggcaaagcaggattttgcaggctgttcatcccaggattcgcagagatggcagcacctctgtacccactgaccaagccgggcaccctgtttaattggggccctgaccagcagaaggcctatcaggagatcaagcaggccctgctgacagcaccagccctgggcctgccagacctgaccaagcctttcgagctgtttgtggatgagaagcagggctacgccaagggcgtgctgacccagaagctgggaccatggagacggcccgtggcctatctgtccaagaagctggacccagtggcagcaggatggccaccatgcctgaggatggtggcagcaatcgccgtgctgacaaaggatgccggcaagctgaccatgggacagccactggtcatcctggcaccacacgcagtggaggccctggtgaagcagcctccagatcgctggctgtctaacgcccggatgacacactaccaggccctgctgctggacaccgatcgcgtgcagtttggccctgtggtggccctgaatccagccaccctgctgcctctgccagaggagggctctggcggctcaaaaagaaccgccgacggcagcgaattcgagtctcccaagaagaagaggaaagtcggctctggccctgccgctaagagagtgaagctggacggaagcggcaaagacggcaagaaggacaagaaagaggaagataagaagtaatagtgagctggagcctcggtggccatgcttcttgccccttgggcctccccccagcccctcctccccttcctgcacccgtacccccgtggtctttgaataaagtctgagtgggcggcaaaaaaaaaaaaaaacaaaaaaaaaaaaaaaaaaaaaaaaaaaccaaaaaaaaaaaaaaaaaaaaaaaaaaaaaaaaaaaccccaaaaaaaaaaaaaaaaaaaaaaaaaaaaaaaaaaaaaaaaaaaaaa

SEQ ID NO: 1320 - RNA, 5555 nt, synthetic construct
  source 1..5555: mol_type = other RNA
aggaaataagagagaaaagaagagtaagaagaaatataagagccaccatgaaacggacagccgacggaagcgagttcgagtcaccaaagaagaagcggaaagtcgcctacgatcctgtggactacccctaccagcctagattcgccgccgctggatccggcaaggataagaaaagcgacggcaaggacagccagaagaagggctctagcgacctcgtgctgggcctcgacatcgggatcggaagcgtcggcgtgggaatcctgaacaaggtcaccggcgagatcatccacaagaacagtagaatcttccctgccgcccaggccgagaacaatgtggagcgcagaattaatagacagggcagaagactgaccagacggaagaagcacagaagagtgcggctgaaccatctgttcgaggagtccggactgatcaccgacttcacaaacgtgagcatcaacctgaacccttatcagctgagagtgaagggcctgaccgacgaactgagcaatgaggagctgttcatcgccctgaagaatatggtcaaacaccggggcatcagctacctggacgacgccagcgatgacggaaacagcagcgtgggcgactacgcccagatcgtgaaagagaacagcaagcagctggaaacaaagacccccggccagatccagctggagcggtaccagaagtacggccaactgcggggagacttcacagtggaagaagacggcaagaagcacagactgattaacgtcttccctaccagcgcctacagggccgaggccctgcggatactgcagacccagcaagagttcaaccctcagattaccgacgaattcatcaactcttacctgcagatcctgaccggaaagaggaagtactaccacggccccggcaacgaaaagagcagaacggattacggaagatacaccacaaagaaagatagcgaggacgagtacatcacgctggacaacatcttcggcatcctgatcggcaagtgcaccttctaccctgaggaatacagagccgccaaggccagctacaccgcccaggagtttaacctgctgaacgatctgaacaacctgacagtgcccaccgagacaaagaaactgtccgaggagcagaagaaccagattatcaccaacgtcaagaacgaaaaggccatgggacccgccaagctgttcaagtacatagccaagctcctgtcctgtgacgtggccgacatcaagggctaccgaatcgacaagtccgataaggccgagatccacaccttcgaggcctacagaaagatgaagaccctggcaacaatagacatagaacaaatggagagagagaacctggacaagctcgcatacgtgctcaccctgaacacagagaaggaaggaatacaggaggccctggagcatgaatttgctgacggaacctttagccaggagcaaatcgacgaactagtgcagttccggaaagccaactcaagcatctttggcaagggctggcacagcttcagcgtcaagctgatgatggagctgatccctgagctgtacgccaccagcgaggagcagatgacaatcctgaccagactgggcaagcaaaagacaaccagcagcagcaacaaaaccaagtacatcgacgagaagcagctgaccgaggaaatctacaatcccgtggccgccaaaagcgtgcgccaggccatcaaaatcgtgaacgccgccatcaaggaatacggcgacttcgacaacattgtgatcgaaatggcaagagagacaaacgaggacgatgaaaagaaggctatccagaaaatccagaaagccaataaggacgagaaagacgccgccatgctgaaggccgccaaccaatataacggcaaggccgagctgcctcacagtgtattccacggccacaagcagctggccaccaagatccggctgtggcaccagcagggcgagagatgcctgtatacaggtaaaaccatcagcatccacgacctgatcaacaacagcaaccagttcgaaatcgatcatatcctgcccctaagcatcacgttcgacgactccctggccaacaaagtgctggtgtacgctaccgcagcccaagagaaaggccagcggaccccttaccaggccctggacagcatggatgacgcctggtccttcagagagctaaaggccttcgtgcgggacagcaaagccctgagcaacaaaaagaaggagtacctgctgacagaggaggacatctccaagttcgacgtgagaaagaagttcatcgagcggaacctggtggacacccggtacgccagcagagtggtgctgaacgcgctacaggagcacttcagagtgcacaagacagacacaaaggtgtctgtggtgagaggccagttcacctcccagctgcggagacactggggcatcgagaaaacaagagacacctaccaccaccacgccgtggatgctctgatcatcgccgcaagcagccagctcaacctgtggaagaagcagaagaacacactggtgagctacagcgaagaccagctgctggacattgaaacgggcgaactgattagcgatgacgagtacaaggaaagcgtgtttaaagccccttaccagcactttgtcgacaccctgaagagtaaggagttcgaggacagcatcctgttctcctaccaagtggacagcaagttcaacagaaagatcagcgacgccaccatctacgccaccagacaggccaaagtgggcaaggacaagaaggacgagacatacgtgctgggcaagatcaaagacatttacagccagaccggatacgacgcctttataaagatatacaaaaaagacaagagcaagttcctgatgtacagacacgaccctcagaccttcgagaaggtgatcgaacctatcctggagaactaccctaacaaagaactgaatgagaagggcaaagaggtaccatgcaacccatttctgaaatacaaggaggaccacggctacatcagaaagtacagcaaaaaaggaaacggccccgaaatcaagagcctgaagtactacgatagcaagctgggcaatcacatagacatcacacccaagaactccaacaacaaggtcgttctgcagagcgtgtccccttggcgggctgacgtgtacttcaataagaccaccggcaaatacgaaatcctgggcctgaagtacgcggacctgaagttcgaaaagggcacaggcacatacaagatcagcgaggaaaagtacaacgacatcaaaatcaaggagggcgtggacagcgacagcgaattcaagttcaccctgtacaagaacgacctgctgctgatcaaggatacggaaacaaaggagcagcaactattccggttcctgagccggaccatgccaaatgtgaagcattacgtagaactgaaaccatacgataaacagaaattcgatgacaacgaggagctgatcaagatcctggggatcgtggccaagggaggccagtgcaagaagggcgtgtccaaaccaaacatcagcatctacaagatcagaaccgacgtgctgggcaaccagcacatcatcaagaacgaaggcgataagcccaagctggacttctccggcggaagctctggtggcagcaagcggaccgccgacggctctgaattcgagagccctaagaagaaaagaaaggtgagcggaggctctagcggcggaagcaccctgaacattgaagacgagtatagactgcatgaaacaagcaaggaacccgacgtgtccctgggctccacctggctgtccgactttccccaggcctgggccgagacaggaggaatgggcctggccgtgcggcaggcacccctgatcatccctctgaaggccacctctacacccgtgagcatcaagcagtaccctatgtctcaggaggccagactgggcatcaagcctcacatccagaggctgctggaccagggcatcctggtgccatgccagagcccctggaacacaccactgctgcccgtgaagaagccaggcaccaatgactatagacccgtgcaggatctgagagaggtgaacaagagggtggaggatatccaccccaccgtgcccaacccttacaatctgctgtccggcctgcccccttctcaccagtggtatacagtgctggacctgaaggatgccttcttttgtctgagactgcaccctaccagccagccactgttcgcctttgagtggagggaccctgagatgggcatctctggccagctgacctggacacgcctgcctcagggcttcaagaatagcccaacactgtttaacgaggccctgcaccgcgacctggcagatttccggatccagcacccagatctgatcctgctgcagtacgtggacgatctgctgctggccgccaccagcgagctggattgccagcagggaacacgcgccctgctgcagaccctgggaaacctgggatatagggcatccgccaagaaggcccagatctgtcagaagcaggtgaagtacctgggctatctgctgaaggagggccagagatggctgacagaggccaggaaggagacagtgatgggccagccaacacccaagaccccaagacagctgagggagttcctgggcaaagcaggattttgcaggctgttcatcccaggattcgcagagatggcagcacctctgtacccactgaccaagccgggcaccctgtttaattggggccctgaccagcagaaggcctatcaggagatcaagcaggccctgctgacagcaccagccctgggcctgccagacctgaccaagcctttcgagctgtttgtggatgagaagcagggctacgccaagggcgtgctgacccagaagctgggaccatggagacggcccgtggcctatctgtccaagaagctggacccagtggcagcaggatggccaccatgcctgaggatggtggcagcaatcgccgtgctgacaaaggatgccggcaagctgaccatgggacagccactggtcatcctggcaccacacgcagtggaggccctggtgaagcagcctccagatcgctggctgtctaacgcccggatgacacactaccaggccctgctgctggacaccgatcgcgtgcagtttggccctgtggtggccctgaatccagccaccctgctgcctctgccagaggagggctctggcggctcaaaaagaaccgccgacggcagcgaattcgagtctcccaagaagaagaggaaagtcggctctggccctgccgctaagagagtgaagctggacggaagcggcaaagacggcaagaaggacaagaaagaggaagataagaagtaatagtgagctggagcctcggtggccatgcttcttgccccttgggcctccccccagcccctcctccccttcctgcacccgtacccccgtggtctttgaataaagtctgagtgggcggcaaaaaaaaaaaaaaacaaaaaaaaaaaaaaaaaaaaaaaaaaaccaaaaaaaaaaaaaaaaaaaaaaaaaaaaaaaaaaaccccaaaaaaaaaaaaaaaaaaaaaaaaaaaaaaaaaaaaaaaaaaaaaa

SEQ ID NO: 1321 - RNA, 5555 nt, synthetic construct
  source 1..5555: mol_type = other RNA
aggaaataagagagaaaagaagagtaagaagaaatataagagccaccatgaaacggacagccgacggaagcgagttcgagtcaccaaagaagaagcggaaagtctacccctacgagctgcctgaatacggccagcctagattcgccgccgctggatctggcaaggataagaaaagcgacggcaaggacagccagaagaagggctccagcgacctcgtgctgggcctcgacatcgggatcggaagcgtcggcgtgggaatcctgaacaaggtcaccggcgagatcatccacaagaacagtagaatcttccctgccgcccaggccgagaacaatgtggagcgcagaattaatagacagggcagaagactgaccagacggaagaagcacagaagagtgcggctgaaccatctgttcgaggagtccggactgatcaccgacttcacaaacgtgagcatcaacctgaacccttatcagctgagagtgaagggcctgaccgacgaactgagcaatgaggagctgttcatcgccctgaagaatatggtcaaacaccggggcatcagctacctggacgacgccagcgatgacggaaacagcagcgtgggcgactacgcccagatcgtgaaagagaacagcaagcagctggaaacaaagacccccggccagatccagctggagcggtaccagaagtacggccaactgcggggagacttcacagtggaagaagacggcaagaagcacagactgattaacgtcttccctaccagcgcctacagggccgaggccctgcggatactgcagacccagcaagagttcaaccctcagattaccgacgaattcatcaactcttacctgcagatcctgaccggaaagaggaagtactaccacggccccggcaacgaaaagagcagaacggattacggaagatacaccacaaagaaagatagcgaggacgagtacatcacgctggacaacatcttcggcatcctgatcggcaagtgcaccttctaccctgaggaatacagagccgccaaggccagctacaccgcccaggagtttaacctgctgaacgatctgaacaacctgacagtgcccaccgagacaaagaaactgtccgaggagcagaagaaccagattatcaccaacgtcaagaacgaaaaggccatgggacccgccaagctgttcaagtacatagccaagctcctgtcctgtgacgtggccgacatcaagggctaccgaatcgacaagtccgataaggccgagatccacaccttcgaggcctacagaaagatgaagaccctggcaacaatagacatagaacaaatggagagagagaacctggacaagctcgcatacgtgctcaccctgaacacagagaaggaaggaatacaggaggccctggagcatgaatttgctgacggaacctttagccaggagcaaatcgacgaactagtgcagttccggaaagccaactcaagcatctttggcaagggctggcacagcttcagcgtcaagctgatgatggagctgatccctgagctgtacgccaccagcgaggagcagatgacaatcctgaccagactgggcaagcaaaagacaaccagcagcagcaacaaaaccaagtacatcgacgagaagcagctgaccgaggaaatctacaatcccgtggccgccaaaagcgtgcgccaggccatcaaaatcgtgaacgccgccatcaaggaatacggcgacttcgacaacattgtgatcgaaatggcaagagagacaaacgaggacgatgaaaagaaggctatccagaaaatccagaaagccaataaggacgagaaagacgccgccatgctgaaggccgccaaccaatataacggcaaggccgagctgcctcacagtgtattccacggccacaagcagctggccaccaagatccggctgtggcaccagcagggcgagagatgcctgtatacaggtaaaaccatcagcatccacgacctgatcaacaacagcaaccagttcgaaatcgatcatatcctgcccctaagcatcacgttcgacgactccctggccaacaaagtgctggtgtacgctaccgcagcccaagagaaaggccagcggaccccttaccaggccctggacagcatggatgacgcctggtccttcagagagctaaaggccttcgtgcgggacagcaaagccctgagcaacaaaaagaaggagtacctgctgacagaggaggacatctccaagttcgacgtgagaaagaagttcatcgagcggaacctggtggacacccggtacgccagcagagtggtgctgaacgcgctacaggagcacttcagagtgcacaagacagacacaaaggtgtctgtggtgagaggccagttcacctcccagctgcggagacactggggcatcgagaaaacaagagacacctaccaccaccacgccgtggatgctctgatcatcgccgcaagcagccagctcaacctgtggaagaagcagaagaacacactggtgagctacagcgaagaccagctgctggacattgaaacgggcgaactgattagcgatgacgagtacaaggaaagcgtgtttaaagccccttaccagcactttgtcgacaccctgaagagtaaggagttcgaggacagcatcctgttctcctaccaagtggacagcaagttcaacagaaagatcagcgacgccaccatctacgccaccagacaggccaaagtgggcaaggacaagaaggacgagacatacgtgctgggcaagatcaaagacatttacagccagaccggatacgacgcctttataaagatatacaaaaaagacaagagcaagttcctgatgtacagacacgaccctcagaccttcgagaaggtgatcgaacctatcctggagaactaccctaacaaagaactgaatgagaagggcaaagaggtaccatgcaacccatttctgaaatacaaggaggaccacggctacatcagaaagtacagcaaaaaaggaaacggccccgaaatcaagagcctgaagtactacgatagcaagctgggcaatcacatagacatcacacccaagaactccaacaacaaggtcgttctgcagagcgtgtccccttggcgggctgacgtgtacttcaataagaccaccggcaaatacgaaatcctgggcctgaagtacgcggacctgaagttcgaaaagggcacaggcacatacaagatcagcgaggaaaagtacaacgacatcaaaatcaaggagggcgtggacagcgacagcgaattcaagttcaccctgtacaagaacgacctgctgctgatcaaggatacggaaacaaaggagcagcaactattccggttcctgagccggaccatgccaaatgtgaagcattacgtagaactgaaaccatacgataaacagaaattcgatgacaacgaggagctgatcaagatcctggggatcgtggccaagggaggccagtgcaagaagggcgtgtccaaaccaaacatcagcatctacaagatcagaaccgacgtgctgggcaaccagcacatcatcaagaacgaaggcgataagcccaagctggacttctccggcggaagctctggtggcagcaagcggaccgccgacggctctgaattcgagagccctaagaagaaaagaaaggtgagcggaggctctagcggcggaagcaccctgaacattgaagacgagtatagactgcatgaaacaagcaaggaacccgacgtgtccctgggctccacctggctgtccgactttccccaggcctgggccgagacaggaggaatgggcctggccgtgcggcaggcacccctgatcatccctctgaaggccacctctacacccgtgagcatcaagcagtaccctatgtctcaggaggccagactgggcatcaagcctcacatccagaggctgctggaccagggcatcctggtgccatgccagagcccctggaacacaccactgctgcccgtgaagaagccaggcaccaatgactatagacccgtgcaggatctgagagaggtgaacaagagggtggaggatatccaccccaccgtgcccaacccttacaatctgctgtccggcctgcccccttctcaccagtggtatacagtgctggacctgaaggatgccttcttttgtctgagactgcaccctaccagccagccactgttcgcctttgagtggagggaccctgagatgggcatctctggccagctgacctggacacgcctgcctcagggcttcaagaatagcccaacactgtttaacgaggccctgcaccgcgacctggcagatttccggatccagcacccagatctgatcctgctgcagtacgtggacgatctgctgctggccgccaccagcgagctggattgccagcagggaacacgcgccctgctgcagaccctgggaaacctgggatatagggcatccgccaagaaggcccagatctgtcagaagcaggtgaagtacctgggctatctgctgaaggagggccagagatggctgacagaggccaggaaggagacagtgatgggccagccaacacccaagaccccaagacagctgagggagttcctgggcaaagcaggattttgcaggctgttcatcccaggattcgcagagatggcagcacctctgtacccactgaccaagccgggcaccctgtttaattggggccctgaccagcagaaggcctatcaggagatcaagcaggccctgctgacagcaccagccctgggcctgccagacctgaccaagcctttcgagctgtttgtggatgagaagcagggctacgccaagggcgtgctgacccagaagctgggaccatggagacggcccgtggcctatctgtccaagaagctggacccagtggcagcaggatggccaccatgcctgaggatggtggcagcaatcgccgtgctgacaaaggatgccggcaagctgaccatgggacagccactggtcatcctggcaccacacgcagtggaggccctggtgaagcagcctccagatcgctggctgtctaacgcccggatgacacactaccaggccctgctgctggacaccgatcgcgtgcagtttggccctgtggtggccctgaatccagccaccctgctgcctctgccagaggagggctctggcggctcaaaaagaaccgccgacggcagcgaattcgagtctcccaagaagaagaggaaagtcggctctggccctgccgctaagagagtgaagctggacggaagcggcaaagacggcaagaaggacaagaaagaggaagataagaagtaatagtgagctggagcctcggtggccatgcttcttgccccttgggcctccccccagcccctcctccccttcctgcacccgtacccccgtggtctttgaataaagtctgagtgggcggcaaaaaaaaaaaaaaacaaaaaaaaaaaaaaaaaaaaaaaaaaaccaaaaaaaaaaaaaaaaaaaaaaaaaaaaaaaaaaaccccaaaaaaaaaaaaaaaaaaaaaaaaaaaaaaaaaaaaaaaaaaaaaa

SEQ ID NO: 1322 - RNA, 5558 nt, synthetic construct
  source 1..5558: mol_type = other RNA
aggaaataagagagaaaagaagagtaagaagaaatataagagccaccatgaaacggacagccgacggaagcgagttcgagtcaccaaagaagaagcggaaagtcggcggcggcggatctggcggaggaggctcccagcctagattcgccgccgctggcagcggcaaggataagaaaagcgacggcaaggacagccagaagaagggcagcagcgacctcgtgctgggcctcgacatcgggatcggaagcgtcggcgtgggaatcctgaacaaggtcaccggcgagatcatccacaagaacagtagaatcttccctgccgcccaggccgagaacaatgtggagcgcagaattaatagacagggcagaagactgaccagacggaagaagcacagaagagtgcggctgaaccatctgttcgaggagtccggactgatcaccgacttcacaaacgtgagcatcaacctgaacccttatcagctgagagtgaagggcctgaccgacgaactgagcaatgaggagctgttcatcgccctgaagaatatggtcaaacaccggggcatcagctacctggacgacgccagcgatgacggaaacagcagcgtgggcgactacgcccagatcgtgaaagagaacagcaagcagctggaaacaaagacccccggccagatccagctggagcggtaccagaagtacggccaactgcggggagacttcacagtggaagaagacggcaagaagcacagactgattaacgtcttccctaccagcgcctacagggccgaggccctgcggatactgcagacccagcaagagttcaaccctcagattaccgacgaattcatcaactcttacctgcagatcctgaccggaaagaggaagtactaccacggccccggcaacgaaaagagcagaacggattacggaagatacaccacaaagaaagatagcgaggacgagtacatcacgctggacaacatcttcggcatcctgatcggcaagtgcaccttctaccctgaggaatacagagccgccaaggccagctacaccgcccaggagtttaacctgctgaacgatctgaacaacctgacagtgcccaccgagacaaagaaactgtccgaggagcagaagaaccagattatcaccaacgtcaagaacgaaaaggccatgggacccgccaagctgttcaagtacatagccaagctcctgtcctgtgacgtggccgacatcaagggctaccgaatcgacaagtccgataaggccgagatccacaccttcgaggcctacagaaagatgaagaccctggcaacaatagacatagaacaaatggagagagagaacctggacaagctcgcatacgtgctcaccctgaacacagagaaggaaggaatacaggaggccctggagcatgaatttgctgacggaacctttagccaggagcaaatcgacgaactagtgcagttccggaaagccaactcaagcatctttggcaagggctggcacagcttcagcgtcaagctgatgatggagctgatccctgagctgtacgccaccagcgaggagcagatgacaatcctgaccagactgggcaagcaaaagacaaccagcagcagcaacaaaaccaagtacatcgacgagaagcagctgaccgaggaaatctacaatcccgtggccgccaaaagcgtgcgccaggccatcaaaatcgtgaacgccgccatcaaggaatacggcgacttcgacaacattgtgatcgaaatggcaagagagacaaacgaggacgatgaaaagaaggctatccagaaaatccagaaagccaataaggacgagaaagacgccgccatgctgaaggccgccaaccaatataacggcaaggccgagctgcctcacagtgtattccacggccacaagcagctggccaccaagatccggctgtggcaccagcagggcgagagatgcctgtatacaggtaaaaccatcagcatccacgacctgatcaacaacagcaaccagttcgaaatcgatcatatcctgcccctaagcatcacgttcgacgactccctggccaacaaagtgctggtgtacgctaccgcagcccaagagaaaggccagcggaccccttaccaggccctggacagcatggatgacgcctggtccttcagagagctaaaggccttcgtgcgggacagcaaagccctgagcaacaaaaagaaggagtacctgctgacagaggaggacatctccaagttcgacgtgagaaagaagttcatcgagcggaacctggtggacacccggtacgccagcagagtggtgctgaacgcgctacaggagcacttcagagtgcacaagacagacacaaaggtgtctgtggtgagaggccagttcacctcccagctgcggagacactggggcatcgagaaaacaagagacacctaccaccaccacgccgtggatgctctgatcatcgccgcaagcagccagctcaacctgtggaagaagcagaagaacacactggtgagctacagcgaagaccagctgctggacattgaaacgggcgaactgattagcgatgacgagtacaaggaaagcgtgtttaaagccccttaccagcactttgtcgacaccctgaagagtaaggagttcgaggacagcatcctgttctcctaccaagtggacagcaagttcaacagaaagatcagcgacgccaccatctacgccaccagacaggccaaagtgggcaaggacaagaaggacgagacatacgtgctgggcaagatcaaagacatttacagccagaccggatacgacgcctttataaagatatacaaaaaagacaagagcaagttcctgatgtacagacacgaccctcagaccttcgagaaggtgatcgaacctatcctggagaactaccctaacaaagaactgaatgagaagggcaaagaggtaccatgcaacccatttctgaaatacaaggaggaccacggctacatcagaaagtacagcaaaaaaggaaacggccccgaaatcaagagcctgaagtactacgatagcaagctgggcaatcacatagacatcacacccaagaactccaacaacaaggtcgttctgcagagcgtgtccccttggcgggctgacgtgtacttcaataagaccaccggcaaatacgaaatcctgggcctgaagtacgcggacctgaagttcgaaaagggcacaggcacatacaagatcagcgaggaaaagtacaacgacatcaaaatcaaggagggcgtggacagcgacagcgaattcaagttcaccctgtacaagaacgacctgctgctgatcaaggatacggaaacaaaggagcagcaactattccggttcctgagccggaccatgccaaatgtgaagcattacgtagaactgaaaccatacgataaacagaaattcgatgacaacgaggagctgatcaagatcctggggatcgtggccaagggaggccagtgcaagaagggcgtgtccaaaccaaacatcagcatctacaagatcagaaccgacgtgctgggcaaccagcacatcatcaagaacgaaggcgataagcccaagctggacttctccggcggaagctctggtggcagcaagcggaccgccgacggctctgaattcgagagccctaagaagaaaagaaaggtgagcggaggctctagcggcggaagcaccctgaacattgaagacgagtatagactgcatgaaacaagcaaggaacccgacgtgtccctgggctccacctggctgtccgactttccccaggcctgggccgagacaggaggaatgggcctggccgtgcggcaggcacccctgatcatccctctgaaggccacctctacacccgtgagcatcaagcagtaccctatgtctcaggaggccagactgggcatcaagcctcacatccagaggctgctggaccagggcatcctggtgccatgccagagcccctggaacacaccactgctgcccgtgaagaagccaggcaccaatgactatagacccgtgcaggatctgagagaggtgaacaagagggtggaggatatccaccccaccgtgcccaacccttacaatctgctgtccggcctgcccccttctcaccagtggtatacagtgctggacctgaaggatgccttcttttgtctgagactgcaccctaccagccagccactgttcgcctttgagtggagggaccctgagatgggcatctctggccagctgacctggacacgcctgcctcagggcttcaagaatagcccaacactgtttaacgaggccctgcaccgcgacctggcagatttccggatccagcacccagatctgatcctgctgcagtacgtggacgatctgctgctggccgccaccagcgagctggattgccagcagggaacacgcgccctgctgcagaccctgggaaacctgggatatagggcatccgccaagaaggcccagatctgtcagaagcaggtgaagtacctgggctatctgctgaaggagggccagagatggctgacagaggccaggaaggagacagtgatgggccagccaacacccaagaccccaagacagctgagggagttcctgggcaaagcaggattttgcaggctgttcatcccaggattcgcagagatggcagcacctctgtacccactgaccaagccgggcaccctgtttaattggggccctgaccagcagaaggcctatcaggagatcaagcaggccctgctgacagcaccagccctgggcctgccagacctgaccaagcctttcgagctgtttgtggatgagaagcagggctacgccaagggcgtgctgacccagaagctgggaccatggagacggcccgtggcctatctgtccaagaagctggacccagtggcagcaggatggccaccatgcctgaggatggtggcagcaatcgccgtgctgacaaaggatgccggcaagctgaccatgggacagccactggtcatcctggcaccacacgcagtggaggccctggtgaagcagcctccagatcgctggctgtctaacgcccggatgacacactaccaggccctgctgctggacaccgatcgcgtgcagtttggccctgtggtggccctgaatccagccaccctgctgcctctgccagaggagggctctggcggctcaaaaagaaccgccgacggcagcgaattcgagtctcccaagaagaagaggaaagtcggctctggccctgccgctaagagagtgaagctggacggaagcggcaaagacggcaagaaggacaagaaagaggaagataagaagtaatagtgagctggagcctcggtggccatgcttcttgccccttgggcctccccccagcccctcctccccttcctgcacccgtacccccgtggtctttgaataaagtctgagtgggcggcaaaaaaaaaaaaaaacaaaaaaaaaaaaaaaaaaaaaaaaaaaccaaaaaaaaaaaaaaaaaaaaaaaaaaaaaaaaaaaccccaaaaaaaaaaaaaaaaaaaaaaaaaaaaaaaaaaaaaaaaaaaaaa

SEQ ID NO: 1323 - RNA, 5555 nt, synthetic construct
  source 1..5555: mol_type = other RNA
aggaaataagagagaaaagaagagtaagaagaaatataagagccaccatgaaacggacagccgacggaagcgagttcgagtcaccaaagaagaagcggaaagtccagttcgagctggccgacccctacacccagcctagattcgccgccgctggatccggcaaggataagaaaagcgacggcaaggacagccagaagaagggctctagcgacctcgtgctgggcctcgacatcgggatcggaagcgtcggcgtgggaatcctgaacaaggtcaccggcgagatcatccacaagaacagtagaatcttccctgccgcccaggccgagaacaatgtggagcgcagaattaatagacagggcagaagactgaccagacggaagaagcacagaagagtgcggctgaaccatctgttcgaggagtccggactgatcaccgacttcacaaacgtgagcatcaacctgaacccttatcagctgagagtgaagggcctgaccgacgaactgagcaatgaggagctgttcatcgccctgaagaatatggtcaaacaccggggcatcagctacctggacgacgccagcgatgacggaaacagcagcgtgggcgactacgcccagatcgtgaaagagaacagcaagcagctggaaacaaagacccccggccagatccagctggagcggtaccagaagtacggccaactgcggggagacttcacagtggaagaagacggcaagaagcacagactgattaacgtcttccctaccagcgcctacagggccgaggccctgcggatactgcagacccagcaagagttcaaccctcagattaccgacgaattcatcaactcttacctgcagatcctgaccggaaagaggaagtactaccacggccccggcaacgaaaagagcagaacggattacggaagatacaccacaaagaaagatagcgaggacgagtacatcacgctggacaacatcttcggcatcctgatcggcaagtgcaccttctaccctgaggaatacagagccgccaaggccagctacaccgcccaggagtttaacctgctgaacgatctgaacaacctgacagtgcccaccgagacaaagaaactgtccgaggagcagaagaaccagattatcaccaacgtcaagaacgaaaaggccatgggacccgccaagctgttcaagtacatagccaagctcctgtcctgtgacgtggccgacatcaagggctaccgaatcgacaagtccgataaggccgagatccacaccttcgaggcctacagaaagatgaagaccctggcaacaatagacatagaacaaatggagagagagaacctggacaagctcgcatacgtgctcaccctgaacacagagaaggaaggaatacaggaggccctggagcatgaatttgctgacggaacctttagccaggagcaaatcgacgaactagtgcagttccggaaagccaactcaagcatctttggcaagggctggcacagcttcagcgtcaagctgatgatggagctgatccctgagctgtacgccaccagcgaggagcagatgacaatcctgaccagactgggcaagcaaaagacaaccagcagcagcaacaaaaccaagtacatcgacgagaagcagctgaccgaggaaatctacaatcccgtggccgccaaaagcgtgcgccaggccatcaaaatcgtgaacgccgccatcaaggaatacggcgacttcgacaacattgtgatcgaaatggcaagagagacaaacgaggacgatgaaaagaaggctatccagaaaatccagaaagccaataaggacgagaaagacgccgccatgctgaaggccgccaaccaatataacggcaaggccgagctgcctcacagtgtattccacggccacaagcagctggccaccaagatccggctgtggcaccagcagggcgagagatgcctgtatacaggtaaaaccatcagcatccacgacctgatcaacaacagcaaccagttcgaaatcgatcatatcctgcccctaagcatcacgttcgacgactccctggccaacaaagtgctggtgtacgctaccgcagcccaagagaaaggccagcggaccccttaccaggccctggacagcatggatgacgcctggtccttcagagagctaaaggccttcgtgcgggacagcaaagccctgagcaacaaaaagaaggagtacctgctgacagaggaggacatctccaagttcgacgtgagaaagaagttcatcgagcggaacctggtggacacccggtacgccagcagagtggtgctgaacgcgctacaggagcacttcagagtgcacaagacagacacaaaggtgtctgtggtgagaggccagttcacctcccagctgcggagacactggggcatcgagaaaacaagagacacctaccaccaccacgccgtggatgctctgatcatcgccgcaagcagccagctcaacctgtggaagaagcagaagaacacactggtgagctacagcgaagaccagctgctggacattgaaacgggcgaactgattagcgatgacgagtacaaggaaagcgtgtttaaagccccttaccagcactttgtcgacaccctgaagagtaaggagttcgaggacagcatcctgttctcctaccaagtggacagcaagttcaacagaaagatcagcgacgccaccatctacgccaccagacaggccaaagtgggcaaggacaagaaggacgagacatacgtgctgggcaagatcaaagacatttacagccagaccggatacgacgcctttataaagatatacaaaaaagacaagagcaagttcctgatgtacagacacgaccctcagaccttcgagaaggtgatcgaacctatcctggagaactaccctaacaaagaactgaatgagaagggcaaagaggtaccatgcaacccatttctgaaatacaaggaggaccacggctacatcagaaagtacagcaaaaaaggaaacggccccgaaatcaagagcctgaagtactacgatagcaagctgggcaatcacatagacatcacacccaagaactccaacaacaaggtcgttctgcagagcgtgtccccttggcgggctgacgtgtacttcaataagaccaccggcaaatacgaaatcctgggcctgaagtacgcggacctgaagttcgaaaagggcacaggcacatacaagatcagcgaggaaaagtacaacgacatcaaaatcaaggagggcgtggacagcgacagcgaattcaagttcaccctgtacaagaacgacctgctgctgatcaaggatacggaaacaaaggagcagcaactattccggttcctgagccggaccatgccaaatgtgaagcattacgtagaactgaaaccatacgataaacagaaattcgatgacaacgaggagctgatcaagatcctggggatcgtggccaagggaggccagtgcaagaagggcgtgtccaaaccaaacatcagcatctacaagatcagaaccgacgtgctgggcaaccagcacatcatcaagaacgaaggcgataagcccaagctggacttctccggcggaagctctggtggcagcaagcggaccgccgacggctctgaattcgagagccctaagaagaaaagaaaggtgagcggaggctctagcggcggaagcaccctgaacattgaagacgagtatagactgcatgaaacaagcaaggaacccgacgtgtccctgggctccacctggctgtccgactttccccaggcctgggccgagacaggaggaatgggcctggccgtgcggcaggcacccctgatcatccctctgaaggccacctctacacccgtgagcatcaagcagtaccctatgtctcaggaggccagactgggcatcaagcctcacatccagaggctgctggaccagggcatcctggtgccatgccagagcccctggaacacaccactgctgcccgtgaagaagccaggcaccaatgactatagacccgtgcaggatctgagagaggtgaacaagagggtggaggatatccaccccaccgtgcccaacccttacaatctgctgtccggcctgcccccttctcaccagtggtatacagtgctggacctgaaggatgccttcttttgtctgagactgcaccctaccagccagccactgttcgcctttgagtggagggaccctgagatgggcatctctggccagctgacctggacacgcctgcctcagggcttcaagaatagcccaacactgtttaacgaggccctgcaccgcgacctggcagatttccggatccagcacccagatctgatcctgctgcagtacgtggacgatctgctgctggccgccaccagcgagctggattgccagcagggaacacgcgccctgctgcagaccctgggaaacctgggatatagggcatccgccaagaaggcccagatctgtcagaagcaggtgaagtacctgggctatctgctgaaggagggccagagatggctgacagaggccaggaaggagacagtgatgggccagccaacacccaagaccccaagacagctgagggagttcctgggcaaagcaggattttgcaggctgttcatcccaggattcgcagagatggcagcacctctgtacccactgaccaagccgggcaccctgtttaattggggccctgaccagcagaaggcctatcaggagatcaagcaggccctgctgacagcaccagccctgggcctgccagacctgaccaagcctttcgagctgtttgtggatgagaagcagggctacgccaagggcgtgctgacccagaagctgggaccatggagacggcccgtggcctatctgtccaagaagctggacccagtggcagcaggatggccaccatgcctgaggatggtggcagcaatcgccgtgctgacaaaggatgccggcaagctgaccatgggacagccactggtcatcctggcaccacacgcagtggaggccctggtgaagcagcctccagatcgctggctgtctaacgcccggatgacacactaccaggccctgctgctggacaccgatcgcgtgcagtttggccctgtggtggccctgaatccagccaccctgctgcctctgccagaggagggctctggcggctcaaaaagaaccgccgacggcagcgaattcgagtctcccaagaagaagaggaaagtcggctctggccctgccgctaagagagtgaagctggacggaagcggcaaagacggcaagaaggacaagaaagaggaagataagaagtaatagtgagctggagcctcggtggccatgcttcttgccccttgggcctccccccagcccctcctccccttcctgcacccgtacccccgtggtctttgaataaagtctgagtgggcggcaaaaaaaaaaaaaaacaaaaaaaaaaaaaaaaaaaaaaaaaaaccaaaaaaaaaaaaaaaaaaaaaaaaaaaaaaaaaaaccccaaaaaaaaaaaaaaaaaaaaaaaaaaaaaaaaaaaaaaaaaaaaaa

SEQ ID NO: 1324 - RNA, 5405 nt, synthetic construct
  source 1..5405: mol_type = other RNA
aggaaataagagagaaaagaagagtaagaagaaatataagagccaccatgaaacggacagccgacggaagcgagttcgagtcaccaaagaagaagcggaaagtcagcgacctcgtgctgggcctcgacatcgggatcggaagcgtcggcgtgggaatcctgaacaaggtcaccggcgagatcatccacaagaacagtagaatcttccctgccgcccaggccgagaacaatgtggagcgcagaattaatagacagggcagaagactgaccagacggaagaagcacagaagagtgcggctgaaccatctgttcgaggagtccggactgatcaccgacttcacaaacgtgagcatcaacctgaacccttatcagctgagagtgaagggcctgaccgacgaactgagcaatgaggagctgttcatcgccctgaagaatatggtcaaacaccggggcatcagctacctggacgacgccagcgatgacggaaacagcagcgtgggcgactacgcccagatcgtgaaagagaacagcaagcagctggaaacaaagacccccggccagatccagctggagcggtaccagaagtacggccaactgcggggagacttcacagtggaagaagacggcaagaagcacagactgattaacgtcttccctaccagcgcctacagggccgaggccctgcggatactgcagacccagcaagagttcaaccctcagattaccgacgaattcatcaactcttacctgcagatcctgaccggaaagaggaagtactaccacggccccggcaacgaaaagagcagaacggattacggaagatacaccacaaagaaagatagcgaggacgagtacatcacgctggacaacatcttcggcatcctgatcggcaagtgcaccttctaccctgaggaatacagagccgccaaggccagctacaccgcccaggagtttaacctgctgaacgatctgaacaacctgacagtgcccaccgagacaaagaaactgtccgaggagcagaagaaccagattatcaccaacgtcaagaacgaaaaggccatgggacccgccaagctgttcaagtacatagccaagctcctgtcctgtgacgtggccgacatcaagggctaccgaatcgacaagtccgataaggccgagatccacaccttcgaggcctacagaaagatgaagaccctggcaacaatagacatagaacaaatggagagagagaacctggacaagctcgcatacgtgctcaccctgaacacagagaaggaaggaatacaggaggccctggagcatgaatttgctgacggaacctttagccaggagcaaatcgacgaactagtgcagttccggaaagccaactcaagcatctttggcaagggctggcacagcttcagcgtcaagctgatgatggagctgatccctgagctgtacgccaccagcgaggagcagatgacaatcctgaccagactgggcaagcaaaagacaaccagcagcagcaacaaaaccaagtacatcgacgagaagcagctgaccgaggaaatctacaatcccgtggccgccaaaagcgtgcgccaggccatcaaaatcgtgaacgccgccatcaaggaatacggcgacttcgacaacattgtgatcgaaatggcaagagagacaaacgaggacgatgaaaagaaggctatccagaaaatccagaaagccaataaggacgagaaagacgccgccatgctgaaggccgccaaccaatataacggcaaggccgagctgcctcacagtgtattccacggccacaagcagctggccaccaagatccggctgtggcaccagcagggcgagagatgcctgtatacaggtaaaaccatcagcatccacgacctgatcaacaacagcaaccagttcgaaatcgatcatatcctgcccctaagcatcacgttcgacgactccctggccaacaaagtgctggtgtacgctaccgcagcccaagagaaaggccagcggaccccttaccaggccctggacagcatggatgacgcctggtccttcagagagctaaaggccttcgtgcgggacagcaaagccctgagcaacaaaaagaaggagtacctgctgacagaggaggacatctccaagttcgacgtgagaaagaagttcatcgagcggaacctggtggacacccggtacgccagcagagtggtgctgaacgcgctacaggagcacttcagagtgcacaagacagacacaaaggtgtctgtggtgagaggccagttcacctcccagctgcggagacactggggcatcgagaaaacaagagacacctaccaccaccacgccgtggatgctctgatcatcgccgcaagcagccagctcaacctgtggaagaagcagaagaacacactggtgagctacagcgaagaccagctgctggacattgaaacgggcgaactgattagcgatgacgagtacaaggaaagcgtgtttaaagccccttaccagcactttgtcgacaccctgaagagtaaggagttcgaggacagcatcctgttctcctaccaagtggacagcaagttcaacagaaagatcagcgacgccaccatctacgccaccagacaggccaaagtgggcaaggacaagaaggacgagacatacgtgctgggcaagatcaaagacatttacagccagaccggatacgacgcctttataaagatatacaaaaaagacaagagcaagttcctgatgtacagacacgaccctcagaccttcgagaaggtgatcgaacctatcctggagaactaccctaacaaagaactgaatgagaagggcaaagaggtaccatgcaacccatttctgaaatacaaggaggaccacggctacatcagaaagtacagcaaaaaaggaaacggccccgaaatcaagagcctgaagtactacgatagcaagctgggcaatcacatagacatcacacccaagaactccaacaacaaggtcgttctgcagagcgtgtccccttggcgggctgacgtgtacttcaataagaccaccggcaaatacgaaatcctgggcctgaagtacgcggacctgaagttcgaaaagggcacaggcacatacaagatcagcgaggaaaagtacaacgacatcaaaatcaaggagggcgtggacagcgacagcgaattcaagttcaccctgtacaagaacgacctgctgctgatcaaggatacggaaacaaaggagcagcaactattccggttcctgagccggaccatgccaaatgtgaagcattacgtagaactgaaaccatacgataaacagaaattcgatgacaacgaggagctgatcaagatcctggggatcgtggccaagggaggccagtgcaagaagggcgtgtccaaaccaaacatcagcatctacaagatcagaaccgacgtgctgggcaaccagcacatcatcaagaacgaaggcgataagcccaagctggacttctccggcggaagctctggtggcagcaagcggaccgccgacggctctgaattcgagagccctaagaagaaaagaaaggtgagcggaggctctagcggcggaagcaccctgaacattgaagacgagtatagactgcatgaaacaagcaaggaacccgacgtgtccctgggctccacctggctgtccgactttccccaggcctgggccgagacaggaggaatgggcctggccgtgcggcaggcacccctgatcatccctctgaaggccacctctacacccgtgagcatcaagcagtaccctatgtctcaggaggccagactgggcatcaagcctcacatccagaggctgctggaccagggcatcctggtgccatgccagagcccctggaacacaccactgctgcccgtgaagaagccaggcaccaatgactatagacccgtgcaggatctgagagaggtgaacaagagggtggaggatatccaccccaccgtgcccaacccttacaatctgctgtccggcctgcccccttctcaccagtggtatacagtgctggacctgaaggatgccttcttttgtctgagactgcaccctaccagccagccactgttcgcctttgagtggagggaccctgagatgggcatctctggccagctgacctggacacgcctgcctcagggcttcaagaatagcccaacactgtttaacgaggccctgcaccgcgacctggcagatttccggatccagcacccagatctgatcctgctgcagtacgtggacgatctgctgctggccgccaccagcgagctggattgccagcagggaacacgcgccctgctgcagaccctgggaaacctgggatatagggcatccgccaagaaggcccagatctgtcagaagcaggtgaagtacctgggctatctgctgaaggagggccagagatggctgacagaggccaggaaggagacagtgatgggccagccaacacccaagaccccaagacagctgagggagttcctgggcaaagcaggattttgcaggctgttcatcccaggattcgcagagatggcagcacctctgtacccactgaccaagccgggcaccctgtttaattggggccctgaccagcagaaggcctatcaggagatcaagcaggccctgctgacagcaccagccctgggcctgccagacctgaccaagcctttcgagctgtttgtggatgagaagcagggctacgccaagggcgtgctgacccagaagctgggaccatggagacggcccgtggcctatctgtccaagaagctggacccagtggcagcaggatggccaccatgcctgaggatggtggcagcaatcgccgtgctgacaaaggatgccggcaagctgaccatgggacagccactggtcatcctggcaccacacgcagtggaggccctggtgaagcagcctccagatcgctggctgtctaacgcccggatgacacactaccaggccctgctgctggacaccgatcgcgtgcagtttggccctgtggtggccctgaatccagccaccctgctgcctctgccagaggagggctctggcggctcaaaaagaaccgccgacggcagcgaattcgagtctcccaagaagaagaggaaagtcggctctggccctgccgctaagagagtgaagctggactaatagtgagctggagcctcggtggccatgcttcttgccccttgggcctccccccagcccctcctccccttcctgcacccgtacccccgtggtctttgaataaagtctgagtgggcggcaaaaaaaaaaaaaaacaaaaaaaaaaaaaaaaaaaaaaaaaaaccaaaaaaaaaaaaaaaaaaaaaaaaaaaaaaaaaaaccccaaaaaaaaaaaaaaaaaaaaaaaaaaaaaaaaaaaaaaaaaaaaaa

SEQ ID NO: 1325 - RNA, 6102 nt, synthetic construct
  source 1..6102: mol_type = other RNA
agacagagacctcgcaggccccgagaactgtcgcccttccacgatgaaacggacagccgacggaagcgagttcgagtcaccaaagaagaagcggaaagtcagcgacctcgtgctgggcctcgacatcgggatcggaagcgtcggcgtgggaatcctgaacaaggtcaccggcgagatcatccacaagaacagtagaatcttccctgccgcccaggccgagaacaatgtggagcgcagaattaatagacagggcagaagactgaccagacggaagaagcacagaagagtgcggctgaaccatctgttcgaggagtccggactgatcaccgacttcacaaacgtgagcatcaacctgaacccttatcagctgagagtgaagggcctgaccgacgaactgagcaatgaggagctgttcatcgccctgaagaatatggtcaaacaccggggcatcagctacctggacgacgccagcgatgacggaaacagcagcgtgggcgactacgcccagatcgtgaaagagaacagcaagcagctggaaacaaagacccccggccagatccagctggagcggtaccagaagtacggccaactgcggggagacttcacagtggaagaagacggcaagaagcacagactgattaacgtcttccctaccagcgcctacagggccgaggccctgcggatactgcagacccagcaagagttcaaccctcagattaccgacgaattcatcaactcttacctgcagatcctgaccggaaagaggaagtactaccacggccccggcaacgaaaagagcagaacggattacggaagatacaccacaaagaaagatagcgaggacgagtacatcacgctggacaacatcttcggcatcctgatcggcaagtgcaccttctaccctgaggaatacagagccgccaaggccagctacaccgcccaggagtttaacctgctgaacgatctgaacaacctgacagtgcccaccgagacaaagaaactgtccgaggagcagaagaaccagattatcaccaacgtcaagaacgaaaaggccatgggacccgccaagctgttcaagtacatagccaagctcctgtcctgtgacgtggccgacatcaagggctaccgaatcgacaagtccgataaggccgagatccacaccttcgaggcctacagaaagatgaagaccctggcaacaatagacatagaacaaatggagagagagaacctggacaagctcgcatacgtgctcaccctgaacacagagaaggaaggaatacaggaggccctggagcatgaatttgctgacggaacctttagccaggagcaaatcgacgaactagtgcagttccggaaagccaactcaagcatctttggcaagggctggcacagcttcagcgtcaagctgatgatggagctgatccctgagctgtacgccaccagcgaggagcagatgacaatcctgaccagactgggcaagcaaaagacaaccagcagcagcaacaaaaccaagtacatcgacgagaagcagctgaccgaggaaatctacaatcccgtggccgccaaaagcgtgcgccaggccatcaaaatcgtgaacgccgccatcaaggaatacggcgacttcgacaacattgtgatcgaaatggcaagagagacaaacgaggacgatgaaaagaaggctatccagaaaatccagaaagccaataaggacgagaaagacgccgccatgctgaaggccgccaaccaatataacggcaaggccgagctgcctcacagtgtattccacggccacaagcagctggccaccaagatccggctgtggcaccagcagggcgagagatgcctgtatacaggtaaaaccatcagcatccacgacctgatcaacaacagcaaccagttcgaaatcgatcatatcctgcccctaagcatcacgttcgacgactccctggccaacaaagtgctggtgtacgctaccgcagcccaagagaaaggccagcggaccccttaccaggccctggacagcatggatgacgcctggtccttcagagagctaaaggccttcgtgcgggacagcaaagccctgagcaacaaaaagaaggagtacctgctgacagaggaggacatctccaagttcgacgtgagaaagaagttcatcgagcggaacctggtggacacccggtacgccagcagagtggtgctgaacgcgctacaggagcacttcagagtgcacaagacagacacaaaggtgtctgtggtgagaggccagttcacctcccagctgcggagacactggggcatcgagaaaacaagagacacctaccaccaccacgccgtggatgctctgatcatcgccgcaagcagccagctcaacctgtggaagaagcagaagaacacactggtgagctacagcgaagaccagctgctggacattgaaacgggcgaactgattagcgatgacgagtacaaggaaagcgtgtttaaagccccttaccagcactttgtcgacaccctgaagagtaaggagttcgaggacagcatcctgttctcctaccaagtggacagcaagttcaacagaaagatcagcgacgccaccatctacgccaccagacaggccaaagtgggcaaggacaagaaggacgagacatacgtgctgggcaagatcaaagacatttacagccagaccggatacgacgcctttataaagatatacaaaaaagacaagagcaagttcctgatgtacagacacgaccctcagaccttcgagaaggtgatcgaacctatcctggagaactaccctaacaaagaactgaatgagaagggcaaagaggtaccatgcaacccatttctgaaatacaaggaggaccacggctacatcagaaagtacagcaaaaaaggaaacggccccgaaatcaagagcctgaagtactacgatagcaagctgggcaatcacatagacatcacacccaagaactccaacaacaaggtcgttctgcagagcgtgtccccttggcgggctgacgtgtacttcaataagaccaccggcaaatacgaaatcctgggcctgaagtacgcggacctgaagttcgaaaagggcacaggcacatacaagatcagcgaggaaaagtacaacgacatcaaaatcaaggagggcgtggacagcgacagcgaattcaagttcaccctgtacaagaacgacctgctgctgatcaaggatacggaaacaaaggagcagcaactattccggttcctgagccggaccatgccaaatgtgaagcattacgtagaactgaaaccatacgataaacagaaattcgatgacaacgaggagctgatcaagatcctggggatcgtggccaagggaggccagtgcaagaagggcgtgtccaaaccaaacatcagcatctacaagatcagaaccgacgtgctgggcaaccagcacatcatcaagaacgaaggcgataagcccaagctggacttctccggcggaagctctggtggcagcaagcggaccgccgacggctctgaattcgagagccctaagaagaaaagaaaggtgagcggaggctctagcggcggaagcaccctgaacattgaagacgagtatagactgcatgaaacaagcaaggaacccgacgtgtccctgggctccacctggctgtccgactttccccaggcctgggccgagacaggaggaatgggcctggccgtgcggcaggcacccctgatcatccctctgaaggccacctctacacccgtgagcatcaagcagtaccctatgtctcaggaggccagactgggcatcaagcctcacatccagaggctgctggaccagggcatcctggtgccatgccagagcccctggaacacaccactgctgcccgtgaagaagccaggcaccaatgactatagacccgtgcaggatctgagagaggtgaacaagagggtggaggatatccaccccaccgtgcccaacccttacaatctgctgtccggcctgcccccttctcaccagtggtatacagtgctggacctgaaggatgccttcttttgtctgagactgcaccctaccagccagccactgttcgcctttgagtggagggaccctgagatgggcatctctggccagctgacctggacacgcctgcctcagggcttcaagaatagcccaacactgtttaacgaggccctgcaccgcgacctggcagatttccggatccagcacccagatctgatcctgctgcagtacgtggacgatctgctgctggccgccaccagcgagctggattgccagcagggaacacgcgccctgctgcagaccctgggaaacctgggatatagggcatccgccaagaaggcccagatctgtcagaagcaggtgaagtacctgggctatctgctgaaggagggccagagatggctgacagaggccaggaaggagacagtgatgggccagccaacacccaagaccccaagacagctgagggagttcctgggcaaagcaggattttgcaggctgttcatcccaggattcgcagagatggcagcacctctgtacccactgaccaagccgggcaccctgtttaattggggccctgaccagcagaaggcctatcaggagatcaagcaggccctgctgacagcaccagccctgggcctgccagacctgaccaagcctttcgagctgtttgtggatgagaagcagggctacgccaagggcgtgctgacccagaagctgggaccatggagacggcccgtggcctatctgtccaagaagctggacccagtggcagcaggatggccaccatgcctgaggatggtggcagcaatcgccgtgctgacaaaggatgccggcaagctgaccatgggacagccactggtcatcctggcaccacacgcagtggaggccctggtgaagcagcctccagatcgctggctgtctaacgcccggatgacacactaccaggccctgctgctggacaccgatcgcgtgcagtttggccctgtggtggccctgaatccagccaccctgctgcctctgccagaggagggcctgcagcacaactgtctggacatcctggcagaggcacacggaacaaggccagacctgaccgatcagcccctgcctgacgccgatcacacatggtataccgatggaagctccctgctgcaggagggccagaggaaggcaggagcagcagtgaccacagagacagaagtgatctgggccaaggccctgccagcaggcacatccgcccagcgggccgagctgatcgccctgacccaggccctgaagatggccgagggcaagaagctgaacgtgtacacagactccagatatgccttcgccaccgcacacatccacggagagatctacaggcgccggggctggctgacctctgagggcaaggagatcaagaacaaggatgagatcctggccctgctgaaggccctgtttctgcccaagcggctgagcatcatccactgtcctggacaccagaagggacactccgccgaggcaaggggcaatcggatggccgaccaggccgccagaaaggctgctattactgaaactcccgacacttccactctgctgattgaaaactcctccccttctggcggctcaaaaagaaccgccgacggcagcgaattcgagtctcccaagaagaagaggaaagtcggctctggccctgccgctaagagagtgaagctggactaatagtgagtgctggtctgtgtgctggcccatcactttggcaaagaattcaccccaccagtgcaggctgcctatcagaaagtggtggctggtgtggctaatgccctggcccacaagtatcactaagctcgctttcttgctgtccaatttctattaaaggttcctttgttccctaagtccaactactaaactgggggatattatgaagggccttgagcatctggattctgcctaataaaaaacatttattttcattgcaaaaaaaaaaaaaaaacaaaaaaaaaaaaaaaaaaaaaaaaaaaccaaaaaaaaaaaaaaaaaaaaaaaaaaaaaaaaaaaccccaaaaaaaaaaaaaaaaaaaaaaaaaaaaaaaaaaaaaaaaaaaaaa

SEQ ID NO: 1326 - protein, 1955 aa, synthetic construct
MKRTADGSEFESPKKKRKVDKKYSIGLDIGTNSVGWAVITDEYKVPSKKFKVLGNTDRHSIKKNLIGALLFDSGETAEATRLKRTARRRYTRRKNRICYLQEIFSNEMAKVDDSFFHRLEESFLVEEDKKHERHPIFGNIVDEVAYHEKYPTIYHLRKKLVDSTDKADLRLIYLALAHMIKFRGHFLIEGDLNPDNSDVDKLFIQLVQTYNQLFEENPINASGVDAKAILSARLSKSRKLENLIAQLPGEKKNGLFGNLIALSLGLTPNFKSNFDLAEDAKLQLSKDTYDDDLDNLLAQIGDQYADLFLAAKNLSDAILLSDILRVNTEITKAPLSASMIKRYDEHHQDLTLLKALVRQQLPEKYKEIFFDQSKNGYAGYIDGGASQEEFYKFIKPILEKMDGTEELLVKLKREDLLRKQRTFDNGSIPHQIHLGELHAILRRQEDFYPFLKDNREKIEKILTFRIPYYVGPLARGNSRFAWMTRKSEETITPWNFEEVVDKGASAQSFIERMTNFDKNLPNEKVLPKHSLLYEYFTVYNELTKVKYVTEGMRKPAFLSGEQKKAIVDLLFKTNRKVTVKQLKEDYFKKIECFDSVEISGVEDRFNASLGTYHDLLKIIKDKDFLDNEENEDILEDIVLTLTLFEDREMIEERLKTYAHLFDDKVMKQLKRRRYTGWGRLSRKLINGIRDKQSGKTILDFLKSDGFANRNFMQLIHDDSLTFKEDIQKAQVSGQGDSLHEHIANLAGSPAIKKGILQTVKVVDELVKVMGRHKPENIVIEMARENQTTQKGQKNSRERMKRIEEGIKELGSQILKEHPVENTQLQNEKLYLYYLQNGRDMYVDQELDINRLSDYDVDAIVPQSFLKDDSIDNKVLTRSDKNRGKSDNVPSEEVVKKMKNYWRQLLNAKLITQRKFDNLTKAERGGLSELDKAGFIKRQLVETRQITKHVAQILDSRMNTKYDENDKLIREVKVITLKSKLVSDFRKDFQFYKVREINNYHHAHDAYLNAVVGTALIKKYPKLESEFVYGDYKVYDVRKMIAKSEQEIGKATAKYFFYSNIMNFFKTEITLANGEIRKRPLIETNGETGEIVWDKGRDFATVRKVLSMPQVNIVKKTEVQTGGFSKESILPKRNSDKLIARKKDWDPKKYGGFDSPTVAYSVLVVAKVEKGKSKKLKSVKELLGITIMERSSFEKNPIDFLEAKGYKEVKKDLIIKLPKYSLFELENGRKRMLASAGELQKGNELALPSKYVNFLYLASHYEKLKGSPEDNEQKQLFVEQHKHYLDEIIEQISEFSKRVILADANLDKVLSAYNKHRDKPIREQAENIIHLFTLTNLGAPAAFKYFDTTIDRKRYTSTKEVLDATLIHQSITGLYETRIDLSQLGGDAPAPAPPAPAPPAPAPPAPAPPAPAPPAPAPPAPAPPAPAPAATLNIEDEYRLHETSKEPDVSLGSTWLSDFPQAWAETGGMGLAVRQAPLIIPLKATSTPVSIKQYPMSQEARLGIKPHIQRLLDQGILVPCQSPWNTPLLPVKKPGTNDYRPVQDLREVNKRVEDIHPTVPNPYNLLSGLPPSHQWYTVLDLKDAFFCLRLHPTSQPLFAFEWRDPEMGISGQLTWTRLPQGFKNSPTLFNEALHRDLADFRIQHPDLILLQYVDDLLLAATSELDCQQGTRALLQTLGNLGYRASAKKAQICQKQVKYLGYLLKEGQRWLTEARKETVMGQPTPKTPRQLREFLGKAGFCRLFIPGFAEMAAPLYPLTKPGTLFNWGPDQQKAYQEIKQALLTAPALGLPDLTKPFELFVDEKQGYAKGVLTQKLGPWRRPVAYLSKKLDPVAAGWPPCLRMVAAIAVLTKDAGKLTMGQPLVILAPHAVEALVKQPPDRWLSNARMTHYQALLLDTDRVQFGPVVALNPATLLPLPEEGLQSGGSKRTADGSEFESPKKKRKVGSGPAAKRVKLD

SEQ ID NO: 1327 - RNA, 6244 nt, synthetic construct
  source 1..6244: mol_type = other RNA
aggataatatacttacatacttactaattaatactaaactcaacgccaccgccaccatgaaacggacagccgacggaagcgagttcgagtcaccaaagaagaagcggaaagtcgacaagaagtacagcatcggcctggacatcggcaccaactctgtgggctgggccgtgatcaccgacgagtacaaggtgcccagcaagaaattcaaggtgctgggcaacaccgaccggcacagcatcaagaagaacctgatcggagccctgctgttcgacagcggcgaaacagccgaggccacccggctgaagagaaccgccagaagaagatacaccagacggaagaaccggatctgctatctgcaagagatcttcagcaacgagatggccaaggtggacgacagcttcttccacagactggaagagtccttcctggtggaagaggataagaagcacgagcggcaccccatcttcggcaacatcgtggacgaggtggcctaccacgagaagtaccccaccatctaccacctgagaaagaaactggtggacagcaccgacaaggccgacctgcggctgatctatctggccctggcccacatgatcaagttccggggccacttcctgatcgagggcgacctgaaccccgacaacagcgacgtggacaagctgttcatccagctggtgcagacctacaaccagctgttcgaggaaaaccccatcaacgccagcggcgtggacgccaaggccatcctgtctgccagactgagcaagagcagaaagctggaaaatctgatcgcccagctgcccggcgagaagaagaatggcctgttcggaaacctgattgccctgagcctgggcctgacccccaacttcaagagcaacttcgacctggccgaggatgccaaactgcagctgagcaaggacacctacgacgacgacctggacaacctgctggcccagatcggcgaccagtacgccgacctgtttctggccgccaagaacctgtccgacgccatcctgctgagcgacatcctgagagtgaacaccgagatcaccaaggcccccctgagcgcctctatgatcaagagatacgacgagcaccaccaggacctgaccctgctgaaagctctcgtgcggcagcagctgcctgagaagtacaaagagattttcttcgaccagagcaagaacggctacgccggctacattgacggcggagccagccaggaagagttctacaagttcatcaagcccatcctggaaaagatggacggcaccgaggaactgctcgtgaagctgaagagagaggacctgctgcggaagcagcggaccttcgacaacggcagcatcccccaccagatccacctgggagagctgcacgccattctgcggcggcaggaagatttttacccattcctgaaggacaaccgggaaaagatcgagaagatcctgaccttccgcatcccctactacgtgggccctctggccaggggaaacagcagattcgcctggatgaccagaaagagcgaggaaaccatcaccccctggaacttcgaggaagtggtggacaagggcgcttccgcccagagcttcatcgagcggatgaccaacttcgataagaacctgcccaacgagaaggtgctgcccaagcacagcctgctgtacgagtacttcaccgtgtataacgagctgaccaaagtgaaatacgtgaccgagggaatgagaaagcccgccttcctgagcggcgagcagaaaaaggccatcgtggacctgctgttcaagaccaaccggaaagtgaccgtgaagcagctgaaagaggactacttcaagaaaatcgagtgcttcgactccgtggaaatctccggcgtggaagatcggttcaacgcctccctgggcacataccacgatctgctgaaaattatcaaggacaaggacttcctggacaatgaggaaaacgaggacattctggaagatatcgtgctgaccctgacactgtttgaggacagagagatgatcgaggaacggctgaaaacctatgcccacctgttcgacgacaaagtgatgaagcagctgaagcggcggagatacaccggctggggcaggctgagccggaagctgatcaacggcatccgggacaagcagtccggcaagacaatcctggatttcctgaagtccgacggcttcgccaacagaaacttcatgcagctgatccacgacgacagcctgacctttaaagaggacatccagaaagcccaggtgtccggccagggcgatagcctgcacgagcacattgccaatctggccggcagccccgccattaagaagggcatcctgcagacagtgaaggtggtggacgagctcgtgaaagtgatgggccggcacaagcccgagaacatcgtgatcgaaatggccagagagaaccagaccacccagaagggacagaagaacagccgcgagagaatgaagcggatcgaagagggcatcaaagagctgggcagccagatcctgaaagaacaccccgtggaaaacacccagctgcagaacgagaagctgtacctgtactacctgcagaatgggcgggatatgtacgtggaccaggaactggacatcaaccggctgtccgactacgatgtggacgctatcgtgcctcagagctttctgaaggacgactccatcgacaacaaggtgctgaccagaagcgacaagaaccggggcaagagcgacaacgtgccctccgaagaggtcgtgaagaagatgaagaactactggcggcagctgctgaacgccaagctgattacccagagaaagttcgacaatctgaccaaggccgagagaggcggcctgagcgaactggataaggccggcttcatcaagagacagctggtggaaacccggcagatcacaaagcacgtggcacagatcctggactcccggatgaacactaagtacgacgagaatgacaagctgatccgggaagtgaaagtgatcaccctgaagtccaagctggtgtccgatttccggaaggatttccagttttacaaagtgcgcgagatcaacaactaccaccacgcccacgacgcctacctgaacgccgtcgtgggaaccgccctgatcaaaaagtaccctaagctggaaagcgagttcgtgtacggcgactacaaggtgtacgacgtgcggaagatgatcgccaagagcgagcaggaaatcggcaaggctaccgccaagtacttcttctacagcaacatcatgaactttttcaagaccgagattaccctggccaacggcgagatccggaagcggcctctgatcgagacaaacggcgaaaccggggagatcgtgtgggataagggccgggattttgccaccgtgcggaaagtgctgagcatgccccaagtgaatatcgtgaaaaagaccgaggtgcagacaggcggcttcagcaaagagtctatcctgcccaagaggaacagcgataagctgatcgccagaaagaaggactgggaccctaagaagtacggcggcttcgacagccccaccgtggcctattctgtgctggtggtggccaaagtggaaaagggcaagtccaagaaactgaagagtgtgaaagagctgctggggatcaccatcatggaaagaagcagcttcgagaagaatcccatcgactttctggaagccaagggctacaaagaagtgaaaaaggacctgatcatcaagctgcctaagtactccctgttcgagctggaaaacggccggaagagaatgctggcctctgccggcgaactgcagaagggaaacgaactggccctgccctccaaatatgtgaacttcctgtacctggccagccactatgagaagctgaagggctcccccgaggataatgagcagaaacagctgtttgtggaacagcacaagcactacctggacgagatcatcgagcagatcagcgagttctccaagagagtgatcctggccgacgctaatctggacaaagtgctgtccgcctacaacaagcaccgggataagcccatcagagagcaggccgagaatatcatccacctgtttaccctgaccaatctgggagcccctgccgccttcaagtactttgacaccaccatcgaccggaagaggtacaccagcaccaaagaggtgctggacgccaccctgatccaccagagcatcaccggcctgtacgagacacggatcgacctgtctcagctgggaggtgacgcccctgctcctgctcctcctgcaccagctccgccagctccagcacctccggctccggcaccaccagctccagctccgcctgctcctgctcctccagctccggctcctccggcaccagcacctgccgctaccctgaacattgaagacgagtatagactgcatgaaacaagcaaggaacccgacgtgtccctgggctccacctggctgtccgactttccccaggcctgggccgagacaggaggaatgggcctggccgtgcggcaggcacccctgatcatccctctgaaggccacctctacacccgtgagcatcaagcagtaccctatgtctcaggaggccagactgggcatcaagcctcacatccagaggctgctggaccagggcatcctggtgccatgccagagcccctggaacacaccactgctgcccgtgaagaagccaggcaccaatgactatagacccgtgcaggatctgagagaggtgaacaagagggtggaggatatccaccccaccgtgcccaacccttacaatctgctgtccggcctgcccccttctcaccagtggtatacagtgctggacctgaaggatgccttcttttgtctgagactgcaccctaccagccagccactgttcgcctttgagtggagggaccctgagatgggcatctctggccagctgacctggacacgcctgcctcagggcttcaagaatagcccaacactgtttaacgaggccctgcaccgcgacctggcagatttccggatccagcacccagatctgatcctgctgcagtacgtggacgatctgctgctggccgccaccagcgagctggattgccagcagggaacacgcgccctgctgcagaccctgggaaacctgggatatagggcatccgccaagaaggcccagatctgtcagaagcaggtgaagtacctgggctatctgctgaaggagggccagagatggctgacagaggccaggaaggagacagtgatgggccagccaacacccaagaccccaagacagctgagggagttcctgggcaaagcaggattttgcaggctgttcatcccaggattcgcagagatggcagcacctctgtacccactgaccaagccgggcaccctgtttaattggggccctgaccagcagaaggcctatcaggagatcaagcaggccctgctgacagcaccagccctgggcctgccagacctgaccaagcctttcgagctgtttgtggatgagaagcagggctacgccaagggcgtgctgacccagaagctgggaccatggagacggcccgtggcctatctgtccaagaagctggacccagtggcagcaggatggccaccatgcctgaggatggtggcagcaatcgccgtgctgacaaaggatgccggcaagctgaccatgggacagccactggtcatcctggcaccacacgcagtggaggccctggtgaagcagcctccagatcgctggctgtctaacgcccggatgacacactaccaggccctgctgctggacaccgatcgcgtgcagtttggccctgtggtggccctgaatccagccaccctgctgcctctgccagaggagggcctgcagtctggcggctcaaaaagaaccgccgacggcagcgaattcgagtctcccaagaagaagaggaaagtcggctctggccctgccgctaagagagtgaagctggactgataagctggagcctcggtggccatgcttcttgccccttgggcctccccccagcccctcctccccttcctgcacccgtacccccgtggtctttgaataaagtctgagtgggcggcgtcatgaaggtttttcttttcctgagaaaacaagaaattgttttctcaggttttgctttttgaaaaaaaagcaaaacaaaaaaaaaaaaaaataaaaaaaaaaaaaaaaaaaaaaaaaaattaaaaaaaaaaaaaaaaaaaaaaaaaaaaaaaaaaattttaaaaaaaaaaaaaaaaaaaaaaaaaaaaaaaaaaaaaaaaaaaaaa

SEQ ID NO: 1328 - RNA, 6161 nt, synthetic construct
  source 1..6161: mol_type = other RNA
agctagcttttctcttctgtcaaccccacacgcctttggcacagccaccatgaaacggacagccgacggaagcgagttcgagtcaccaaagaagaagcggaaagtcgacaagaagtacagcatcggcctggacatcggcaccaactctgtgggctgggccgtgatcaccgacgagtacaaggtgcccagcaagaaattcaaggtgctgggcaacaccgaccggcacagcatcaagaagaacctgatcggagccctgctgttcgacagcggcgaaacagccgaggccacccggctgaagagaaccgccagaagaagatacaccagacggaagaaccggatctgctatctgcaagagatcttcagcaacgagatggccaaggtggacgacagcttcttccacagactggaagagtccttcctggtggaagaggataagaagcacgagcggcaccccatcttcggcaacatcgtggacgaggtggcctaccacgagaagtaccccaccatctaccacctgagaaagaaactggtggacagcaccgacaaggccgacctgcggctgatctatctggccctggcccacatgatcaagttccggggccacttcctgatcgagggcgacctgaaccccgacaacagcgacgtggacaagctgttcatccagctggtgcagacctacaaccagctgttcgaggaaaaccccatcaacgccagcggcgtggacgccaaggccatcctgtctgccagactgagcaagagcagaaagctggaaaatctgatcgcccagctgcccggcgagaagaagaatggcctgttcggaaacctgattgccctgagcctgggcctgacccccaacttcaagagcaacttcgacctggccgaggatgccaaactgcagctgagcaaggacacctacgacgacgacctggacaacctgctggcccagatcggcgaccagtacgccgacctgtttctggccgccaagaacctgtccgacgccatcctgctgagcgacatcctgagagtgaacaccgagatcaccaaggcccccctgagcgcctctatgatcaagagatacgacgagcaccaccaggacctgaccctgctgaaagctctcgtgcggcagcagctgcctgagaagtacaaagagattttcttcgaccagagcaagaacggctacgccggctacattgacggcggagccagccaggaagagttctacaagttcatcaagcccatcctggaaaagatggacggcaccgaggaactgctcgtgaagctgaagagagaggacctgctgcggaagcagcggaccttcgacaacggcagcatcccccaccagatccacctgggagagctgcacgccattctgcggcggcaggaagatttttacccattcctgaaggacaaccgggaaaagatcgagaagatcctgaccttccgcatcccctactacgtgggccctctggccaggggaaacagcagattcgcctggatgaccagaaagagcgaggaaaccatcaccccctggaacttcgaggaagtggtggacaagggcgcttccgcccagagcttcatcgagcggatgaccaacttcgataagaacctgcccaacgagaaggtgctgcccaagcacagcctgctgtacgagtacttcaccgtgtataacgagctgaccaaagtgaaatacgtgaccgagggaatgagaaagcccgccttcctgagcggcgagcagaaaaaggccatcgtggacctgctgttcaagaccaaccggaaagtgaccgtgaagcagctgaaagaggactacttcaagaaaatcgagtgcttcgactccgtggaaatctccggcgtggaagatcggttcaacgcctccctgggcacataccacgatctgctgaaaattatcaaggacaaggacttcctggacaatgaggaaaacgaggacattctggaagatatcgtgctgaccctgacactgtttgaggacagagagatgatcgaggaacggctgaaaacctatgcccacctgttcgacgacaaagtgatgaagcagctgaagcggcggagatacaccggctggggcaggctgagccggaagctgatcaacggcatccgggacaagcagtccggcaagacaatcctggatttcctgaagtccgacggcttcgccaacagaaacttcatgcagctgatccacgacgacagcctgacctttaaagaggacatccagaaagcccaggtgtccggccagggcgatagcctgcacgagcacattgccaatctggccggcagccccgccattaagaagggcatcctgcagacagtgaaggtggtggacgagctcgtgaaagtgatgggccggcacaagcccgagaacatcgtgatcgaaatggccagagagaaccagaccacccagaagggacagaagaacagccgcgagagaatgaagcggatcgaagagggcatcaaagagctgggcagccagatcctgaaagaacaccccgtggaaaacacccagctgcagaacgagaagctgtacctgtactacctgcagaatgggcgggatatgtacgtggaccaggaactggacatcaaccggctgtccgactacgatgtggacgctatcgtgcctcagagctttctgaaggacgactccatcgacaacaaggtgctgaccagaagcgacaagaaccggggcaagagcgacaacgtgccctccgaagaggtcgtgaagaagatgaagaactactggcggcagctgctgaacgccaagctgattacccagagaaagttcgacaatctgaccaaggccgagagaggcggcctgagcgaactggataaggccggcttcatcaagagacagctggtggaaacccggcagatcacaaagcacgtggcacagatcctggactcccggatgaacactaagtacgacgagaatgacaagctgatccgggaagtgaaagtgatcaccctgaagtccaagctggtgtccgatttccggaaggatttccagttttacaaagtgcgcgagatcaacaactaccaccacgcccacgacgcctacctgaacgccgtcgtgggaaccgccctgatcaaaaagtaccctaagctggaaagcgagttcgtgtacggcgactacaaggtgtacgacgtgcggaagatgatcgccaagagcgagcaggaaatcggcaaggctaccgccaagtacttcttctacagcaacatcatgaactttttcaagaccgagattaccctggccaacggcgagatccggaagcggcctctgatcgagacaaacggcgaaaccggggagatcgtgtgggataagggccgggattttgccaccgtgcggaaagtgctgagcatgccccaagtgaatatcgtgaaaaagaccgaggtgcagacaggcggcttcagcaaagagtctatcctgcccaagaggaacagcgataagctgatcgccagaaagaaggactgggaccctaagaagtacggcggcttcgacagccccaccgtggcctattctgtgctggtggtggccaaagtggaaaagggcaagtccaagaaactgaagagtgtgaaagagctgctggggatcaccatcatggaaagaagcagcttcgagaagaatcccatcgactttctggaagccaagggctacaaagaagtgaaaaaggacctgatcatcaagctgcctaagtactccctgttcgagctggaaaacggccggaagagaatgctggcctctgccggcgaactgcagaagggaaacgaactggccctgccctccaaatatgtgaacttcctgtacctggccagccactatgagaagctgaagggctcccccgaggataatgagcagaaacagctgtttgtggaacagcacaagcactacctggacgagatcatcgagcagatcagcgagttctccaagagagtgatcctggccgacgctaatctggacaaagtgctgtccgcctacaacaagcaccgggataagcccatcagagagcaggccgagaatatcatccacctgtttaccctgaccaatctgggagcccctgccgccttcaagtactttgacaccaccatcgaccggaagaggtacaccagcaccaaagaggtgctggacgccaccctgatccaccagagcatcaccggcctgtacgagacacggatcgacctgtctcagctgggaggtgacgcccctgctcctgctcctcctgcaccagctccgccagctccagcacctccggctccggcaccaccagctccagctccgcctgctcctgctcctccagctccggctcctccggcaccagcacctgccgctaccctgaacattgaagacgagtatagactgcatgaaacaagcaaggaacccgacgtgtccctgggctccacctggctgtccgactttccccaggcctgggccgagacaggaggaatgggcctggccgtgcggcaggcacccctgatcatccctctgaaggccacctctacacccgtgagcatcaagcagtaccctatgtctcaggaggccagactgggcatcaagcctcacatccagaggctgctggaccagggcatcctggtgccatgccagagcccctggaacacaccactgctgcccgtgaagaagccaggcaccaatgactatagacccgtgcaggatctgagagaggtgaacaagagggtggaggatatccaccccaccgtgcccaacccttacaatctgctgtccggcctgcccccttctcaccagtggtatacagtgctggacctgaaggatgccttcttttgtctgagactgcaccctaccagccagccactgttcgcctttgagtggagggaccctgagatgggcatctctggccagctgacctggacacgcctgcctcagggcttcaagaatagcccaacactgtttaacgaggccctgcaccgcgacctggcagatttccggatccagcacccagatctgatcctgctgcagtacgtggacgatctgctgctggccgccaccagcgagctggattgccagcagggaacacgcgccctgctgcagaccctgggaaacctgggatatagggcatccgccaagaaggcccagatctgtcagaagcaggtgaagtacctgggctatctgctgaaggagggccagagatggctgacagaggccaggaaggagacagtgatgggccagccaacacccaagaccccaagacagctgagggagttcctgggcaaagcaggattttgcaggctgttcatcccaggattcgcagagatggcagcacctctgtacccactgaccaagccgggcaccctgtttaattggggccctgaccagcagaaggcctatcaggagatcaagcaggccctgctgacagcaccagccctgggcctgccagacctgaccaagcctttcgagctgtttgtggatgagaagcagggctacgccaagggcgtgctgacccagaagctgggaccatggagacggcccgtggcctatctgtccaagaagctggacccagtggcagcaggatggccaccatgcctgaggatggtggcagcaatcgccgtgctgacaaaggatgccggcaagctgaccatgggacagccactggtcatcctggcaccacacgcagtggaggccctggtgaagcagcctccagatcgctggctgtctaacgcccggatgacacactaccaggccctgctgctggacaccgatcgcgtgcagtttggccctgtggtggccctgaatccagccaccctgctgcctctgccagaggagggcctgcagtctggcggctcaaaaagaaccgccgacggcagcgaattcgagtctcccaagaagaagaggaaagtcggctctggccctgccgctaagagagtgaagctggactgataagctggagcctcggtggccatgcttcttgccccttgggcctccccccagcccctcctccccttcctgcacccgtacccccgtggtctttgaataaagtctgagtgggcggccaaaaaaaaaaaaaaataaaaaaaaaaaaaaaaaaaaaaaaaaattaaaaaaaaaaaaaaaaaaaaaaaaaaaaaaaaaaattttaaaaaaaaaaaaaaaaaaaaaaaaaaaaaaaaaaaaaaaaaaaaaa
